(19) United States
(12) Patent Application Publication
(10) Pub. No.: US 2022/0267416 A1
(43) Pub. Date: Aug. 25, 2022

(54) HIV BINDING AGENTS

(71) Applicant: Lausanne University Hospital, Lausanne (CH)

(72) Inventors: Giuseppe Pantaleo, Lausanne (CH); Craig Fenwick, Lausanne (CH)

(73) Assignee: Lausanne University Hospital, Lausanne (CH)

(21) Appl. No.: 17/626,854

(22) PCT Filed: Jul. 15, 2020
(86) PCT No.: PCT/IB2020/056668

§ 371 Date: Jan. 13, 2022

Related U.S. Application Data
(60) Provisional application No. 62/874,042, filed on Jul. 15, 2019.
(60) Provisional application No. 62/874,057, filed on Jul. 15, 2019.

(51) Int. Cl. C07K 16/10; A61P 31/18; G01N 33/569

(52) U.S. Cl. CPC C07K 16/1063; A61P 31/18; G01N 33/56988; C07K 2317/76; C07K 2317/92; C07K 2317/515; C07K 2317/31; G01N 2333/162; C07K 2317/33; C07K 2317/51; C07K 2317/21

(57) ABSTRACT

This disclosure relates to LN02M binding agents with specificity for HIV and to methods for using the same to treat, prevent and/or ameliorate HIV infection and/or AIDS. In some embodiments, this disclosure provides a binding agent(s) comprising a variable region shown in FIGS. 6A through 6E; amino acid sequence of any mutant of FIGS. 7A through 7D and/or FIGS. 8A through 8F, and any effective (e.g., HIV neutralization) combination thereof; any one or more of SEQ ID NOS. 3-92, 95-233, 248-482, or 491-699; and/or combinations thereof.

### RELATED APPLICATIONS

[0001] This application claims priority to U.S. Ser. No. 62/874,042 filed Jul. 15, 2019 and U.S. Ser. No. 62/874,057 filed on Jul. 15, 2019, each of which being incorporated into this disclosure in their entireties.

### FIELD OF THE DISCLOSURE

[0002] This disclosure relates to binding agents with specificity for human immunodeficiency virus (HIV), methods for making the same, and to methods for using the same to treat and/or prevent HIV infection.

### BACKGROUND OF THE DISCLOSURE

[0003] As we enter the fourth decade of the HIV epidemic, significant advances have been made in the understanding of HIV pathogenesis and in the development of potent and safe antiviral drugs. More than 30 antiviral drugs have been registered and the impact of combination antiretroviral therapy (ART) on both morbidity and mortality has been remarkable. However, despite the long-term suppression of HIV replication achieved in patients with optimal adherence to ART, HIV invariably rebounds after interruption of therapy. Furthermore, successful therapy does not induce or allow restoration/development of virus-specific immune responses capable of controlling HIV replication in the absence of ART. Thus, life-long ART is needed to control HIV replication and associated disease in the large majority of HIV infected subjects.

[0004] A number of immunological interventions have been investigated in the past and currently being further developed with the goal to achieve HIV functional cure, wherein viral replication is suppressed without sustained antiviral therapy. Therapeutic vaccine strategies have been the primary intervention strategy investigated but the results have shown modest efficacy in experimental animal models and patients with the exception of a CMV-based vector HIV vaccine (50% efficacy in the NHP model). Recent studies have generated interesting results on the possibility of using anti-envelope broad neutralizing antibodies (bNabs) as therapeutic agents in HIV infection.

[0005] There is a need in the art for additional reagents for targeting HIV, especially neutralizing antibodies, and methods for using the same. This disclosure addresses those needs by providing reagents and methods that may be used to target HIV and cells and/or tissues infected by and/or harboring the same.

### BRIEF DESCRIPTION OF THE DRAWINGS

[0006] In the following a brief description of the appended figures will be given. The figures are intended to illustrate the present invention in more detail. However, they are not intended to limit the subject matter of the invention in any way.

[0007] FIG. 1 shows an overview of LN02 mutations that confer either an improved potency, modest to no effect on potency or reduced neutralization potency relative to wild type LN02 in a TZM-bl reporter assay performed with the BaL HIV-1 virus. The wild type sequence for LN02 heavy and light chain are aligned with the closely related germline sequences and the individual amino acid substitutions listed below. Substitutions that induce an increase in neutralization potency by >1.4-fold are shown in black text with a grey background, no significant change in neutralization activity are in black text alone and substitutions that induce a loss in potency against the BaL virus are in white text with a black background.

[0008] FIG. 2 shows the neutralization activity presented as IC80 values for LN02 bNab with heavy chain mutations profiled against a global panel of eight pseudo-typed HIV-1 viruses. Neutralization activity was calculated using concentration response inhibition curves for each of the antibodies and IC80 values for each of the pseudo-typed viruses is indicated by the symbol in the legend. Where the IC80 was above the maximum concentration tested, a value of 20 μg/ml was used in the graph as a point of reference for the individual bNabs.

[0009] FIG. 3 shows the neutralization activity presented as IC80 values for LN02 bNab with light chain mutations profiled against a global panel of eight pseudo-typed HIV-1 viruses. Neutralization activity was calculated using concentration response inhibition curves for each of the antibodies and IC80 values for each of the pseudo-typed viruses is indicated by the symbol in the legend. Where the IC80 was above the maximum concentration tested, a value of 20 μg/ml was used in the graph as a point of reference for the individual bNabs.

[0010] FIG. 4 shows the neutralization activity presented as IC80 values for select single and multiple mutations in LN02 bNab along with 3BNC117, 101074 and VRC01 bNabs profiled against a global panel of eight pseudo-typed viruses. Neutralization activity was calculated using concentration response inhibition curves for each of the antibodies and IC80 values for each of the pseudo-typed viruses is indicated by the symbol in the legend. Where the IC80 was above the maximum concentration tested, a value of 20 μg/ml was used in the graph as a point of reference for the individual bNabs.

[0011] FIG. 5 shows the concentration response curves for select LN02 bNab variants with percent neutralization of the indicated pseudo-typed HIV-1 viruses in a TZM-bl luciferase reporter assay. The SVA-MLV pseudo-virus used as a negative control demonstrates that the bNabs tested do not exhibit non-specific inhibition.

[0012] FIG. 6. FIG. 6A. Exemplary LN02 variable heavy chain amino acid sequences.

[0013] FIG. 6B. Additional exemplary LN02 variable heavy chain amino acid sequences. FIG. 6C. Additional exemplary LN02 variable heavy chain amino acid sequences. FIG. 6D.

[0014] Exemplary LN02 variable light chain amino acid sequences. FIG. 6E. Additional exemplary LN02 variable light chain amino acid sequences.

[0015] FIG. 7. FIG. 7A. Exemplary LN02 variable heavy chain amino acid sequences.

[0016] FIG. 7B. Additional exemplary LN02 variable heavy chain amino acid sequences. FIG. 7C. Additional exemplary LN02 variable heavy chain amino acid sequences. FIG. 7D.

[0017] Exemplary LN02 variable heavy chain amino acid sequences. FIG. 7E. Additional exemplary LN02 variable heavy chain amino acid sequences.

[0018] FIG. 8. FIG. 8A. Exemplary LN02 variable light chain amino acid sequences.

[0019] FIG. 8B. Additional exemplary LN02 variable light chain amino acid sequences. FIG. 8C. Additional exemplary LN02 variable light chain amino acid sequences. FIG. 8D. Exemplary LN02 variable light chain amino acid sequences. FIG. 8E. Additional exemplary LN02 variable light chain amino acid sequences. FIG. 8F. Additional exemplary LN02 variable light chain amino acid sequences.

[0020] FIG. 9. FIG. 9A. Neutralization of AC10 pseudovirus. FIG. 9B. Neutralization of 25710 pseudovirus. FIG. 9C. Neutralization of CH119 pseudovirus. FIG. 9D. Neutralization of TRO.11 pseudovirus. FIG. 9E. Neutralization of 246F3 pseudovirus. FIG. 9F. Neutralization of CE1176 pseudovirus. FIG. 9G. Neutralization of CN155 pseudovirus. FIG. 9H. Neutralization of BJOX pseudovirus. FIG. 9I. Neutralization of CN155 pseudovirus.

### SUMMARY OF THE DISCLOSURE

[0021] This disclosure relates to binding agents with specificity for human immunodeficiency virus (HIV), methods for producing such binding agents, as well as methods for using such binding agents to treat, prevent and/or ameliorate HIV infection. In some embodiments, this disclosure provides a binding agent(s) comprising a variable region shown in FIGS. 6A through 6E; amino acid sequence of any mutant of FIGS. 7A through 7D and/or FIGS. 8A through 8F, and any effective (e.g., HIV neutralization) combination thereof; any one or more of SEQ ID NOS. 3-92, 95-233, 248-482, or 491-699, and any effective (e.g., HIV neutralization) combination thereof; a combination of light and heavy chains shown in Table 9 (i.e., ML085, Mx152, MX067, MX129, MX130, ML126, Mx175, Mx176, and Mx181); a combination of light and heavy chains shown in Tables 10A through 10C, 11, 12A through 12D, 13A through 13D, or 14; as well as variants thereof. Reagents and methods for producing and/or using the same are also disclosed. Other embodiments are also contemplated as will be apparent to those of ordinary skill in the art from this disclosure.

### DETAILED DESCRIPTION

[0022] This disclosure relates to binding agents having binding affinity for human immunodeficiency virus (HIV). In some embodiments, the binding agent can bind HIV antigens on viral particles per se or on the surface of cells in vitro and/or in vivo. The binding agents may also bind isolated HIV antigens and/or fragments and/or derivatives thereof, typically in vitro. Also provided are methods for using such binding agents to diagnose, treat, prevent and/or ameliorate one or more diseases associated with HIV. For instance, the binding agents may be antibodies (e.g., monoclonal antibodies) that may react with and/or bind to the epitopes of HIV or polypeptides thereof. The binding agents may be useful for treating disease caused by HIV, such as Acquired Immune Deficiency Syndrome (AIDS). In some embodiments, the binding agents described herein may selectively target and/or eliminate HIV and/or HIV-infected cells containing HIV (e.g., replication competent HIV) and/or expressing proteins thereof. In some embodiments, such cells may be reservoirs for replication competent HIV. In some embodiments, binding agents having, for instance, different specificities (e.g., recognizing different epitopes) may be combined to HIV activity such as infection, replication and/or spread to other cells. In some embodiments, the binding agents described herein may also provide for the selective elimination and/or suppression of HIV or HIV-expressing cells. In some embodiments, the binding agents described herein may be used to suppress and/or eliminate HIV and/or HIV-expressing cells to treat, for instance, HIV infection and/or AIDS. Other embodiments, uses and the like are described below.

[0023] The binding agents may be antibodies such as monoclonal antibodies. As shown in the examples herein, the techniques discussed below have been used to identify a fully human mAb termed “LN02”, having particular amino acid sequences and characteristics that have described here (e.g., FIGS. 1 and 6A-E) and elsewhere. Variants of the LN02 binding agents (modified LN02 binding agents (“LN02M”)) are described herein and shown in the examples. The LN02M binding agents were prepared using recombinant molecular biology techniques. In some embodiments, the LN02M binding agents are described by referencing the amino acid and/or nucleic acid sequences corresponding to the variability and/or complementarity determining regions (“CDRs”) thereof. A CDR is known in the art to comprise amino acid sequences within the variable region identified in accordance with the definitions of the Kabat, Chothia, the accumulation of both Kabat and Chothia, AbM, contact, and/or conformational definitions or any method of CDR determination well known in the art. antibody modeling software (now Accelrys®), or the “contact definition” of CDRs based on observed antigen contacts described by MacCallum et al., 1996, J. Mol. Biol., 262:732-745. In the “conformational definition” of CDRs, the positions of the CDRs may be identified as the residues that make enthalpic contributions to antigen binding (Makabe et al., 2008, Journal of Biological Chemistry, 283:1156-1166). Still other CDR boundary definitions may not strictly follow one of the above approaches, but may nonetheless overlap with at least a portion of the Kabat CDRs, although they may be shortened or lengthened in light of prediction or experimental findings that particular residues or groups of residues or even entire CDRs do not significantly impact antigen binding. As used herein, a CDR may refer to CDRs defined by any approach known in the art, including combinations of approaches. The methods used herein may utilize CDRs defined according to any of these approaches. For any given embodiment containing more than one CDR, the CDRs may be defined in accordance with any of Kabat, Chothia, extended, AbM, contact, and/or conformational definitions. In one embodiment, the skilled artisan will understand the meaning and characteristics (including the amino acid sequence) of the CDRs of LN02M binding agents from this disclosure by, for instance, with reference to those illustrated in FIG. 1 (e.g., SEQ ID NOS. 234 and 235; see also SEQ ID NOS. 1 and 93) and discussed below.

[0024] Exemplary, and preferred, amino acid sequences of the three heavy chain CDRs (CDRH1, CDRH2, CDRH3), three light chain CDRs (CDRL1, CDRL2, CDRL3), V_{H} and V_{L} domains of the LN02M binding agents (e.g., antibodies) are summarized below and in FIG. 1. Specific examples, and in some embodiments, preferred, LN02M binding agents, and/or portions thereof, are described in SEQ ID NOS. 3-92, SEQ ID NOS. 95-233 and FIGS. 6A-E. The functional phenotype (e.g., particular activities) of exemplary LN02M binding agents are also described in Tables 1-3, as well as FIGS. 2-5, and in the Examples section below. In some embodiments, the LN02M binding agents are antibodies including one or more of the CDRs described in FIG. 1 and/or FIGS. 6A-E and/or SEQ ID NOS. 3-92, and/or SEQ ID NOS. 95-233, and/or SEQ ID NOS. 248-482, and/or SEQ ID NOS. 491-699, and/or having the functional phenotype of those described in any of Tables 1-3 and/or 1-14, and/or as illustrated by FIGS. 2-5 and/or FIG. 9. In some preferred embodiments, the LN02M binding agents comprise one or more of the CDRs illustrated in FIG. 1, such as any one or more of SEQ ID NOS. 3-92, and/or SEQ ID NOS. 95-233, and the functional phenotypes described in Tables 1-3, as well as FIGS. 2-5. In some preferred embodiments, the LN02M binding agents comprise one of more of the polypeptide sequences of SEQ ID NOS. 3-92, SEQ ID NOS. 95-233, SEQ ID NOS. 248-482, and/or SEQ ID NOS. 491-699, and/or shown in FIGS. 6A-E, 7A-E, 8A-F, as well as the functional phenotypes described in any of Tables 1-3 and/or 7-14, and/or FIGS. 2-5 and/or 9.

[0025] In some embodiments, the LN02M binding agent comprises a modified LN02 CDRH1 (YGSISRHFWG), corresponding to amino acids 26-35 of the LN02_VH amino acid sequence illustrated in FIG. 1 (SEQ ID NO.: 234), and numbered left to right as Y1, G2, S3, 14, S5, R6, H7, F8, W9, and G10, may comprise any one or more, including all, or in some embodiments one or more conservative variants thereof, of the following substitutions: Y1 by W, D, H, or R; S3 by W, Y, T, or Q; S5 by W, T, Y, M or A; R6 by W, K, Y, E or Q; H7 by W, Y, Q, N, D, E, A, T or S; F8 by W or Y; and/or W9 by F. Particularly preferred substitutions to LN02 CDRH1 (YGSISRHFWG), selected on the basis of HIV neutralization potency relative to wild-type LN02 (i.e., >1.4-fold increase (e.g., FIG. 1)), are S3 to Y or T; S5 to T; and/or, H7 to D.

[0026] In some embodiments, the LN02M binding agent comprises a modified LN02 CDRH2 (HMHHLGVKYVNPSLK), corresponding to amino acids 50-64 of the LN02_VH amino acid sequence illustrated in FIG. 1 (SEQ ID NO.: 234), and numbered left to right as H1, M2, H3, H4, L5, G6, V7, K8, Y9, V10, N11, P12, S13, L14 and K15, may comprise any one or more, including all, or in some embodiments one or more conservative variants thereof, of the following substitutions: H1 by Y, Q or T; M2 by W, I, F or R; H3 by Y, Q or T; H4 by Y, Q or T; L5 by W, F, R, E, Y, V or A; G6 by D; V7 by W, T, F, Y or H; K8 by W, D, E or R; Y9 by D, Q, H, I or E; V10 by S, M, T or A; N11 by F; P12 by G; S13 by T; L14 by W, F or V; and/or, K15 by D, E or H. Particularly preferred substitutions to LN02 CDRH2 (HMHHLGVKYVNPSLK), selected on the basis of HIV neutralization potency relative to wild-type LN02 (i.e., >1.4-fold increase (e.g., FIG. 1)), are M2 by F or R; H4 by Q or T; V7 by F or Y; Y9 by D, Q, or E; and/or L14 by F or V.

[0027] In some embodiments, the LN02M binding agent comprises a modified LN02 CDRH3 (VRMGARMSDIAFFSFGD), corresponding to amino acids 96-112 of the LN02M_VH amino acid sequence illustrated in FIG. 1 (SEQ ID NO.: 234), and numbered left to right as V1, R2, M3, G4, A5, R6, M7, S8, D9, 110, A11, F12, F13, S14, F15, G16, and D17, may comprise any one or more, including all, or in some embodiments one or more conservative variants thereof, of the following substitutions: V1 by A; M3 by I or Y; A5 by T, S or Y; R6 by W; M7 by W, A, V or Y; S8 by W, A, Y, T, H, D, V or Q; D9 by W, E or R; 110 by W, V or Y; A11 by Q, W, Y or H; F12 by W, Y, H or M; F13 by Y; S14 by A, T or Y; F15 by W or Y; G16 by D or S; and/or, D17 by E. Particularly preferred substitutions to LN02 CDRH3 (VRMGARMSDIAFFSFGD), selected on the basis of HIV neutralization potency relative to wild-type LN02 (i.e., >1.4-fold increase (e.g., FIG. 1)), are A5 by S; M7 by W or Y; S8 by W, A, Y, or T; A11 by Q; F12 by W; F13 by Y; S14 by Y; and/or F15 by Y.

[0028] In some embodiments, the LN02M binding agent comprises a modified LN02 CDRL1 (WGYYMGSKPVN), corresponding to amino acids 23-33 of the LN02M_VL sequence illustrated in FIG. 1 (SEQ ID NO.: 235), and numbered left to right as W1, G2, Y3, Y4, M5, G6, S7, K8, P9, V10, and N11, may comprise any one or more, including all, or in some embodiments one or more conservative variants thereof, of the following substitutions: W1 by G; Y3 by W, S or D; Y4 by W, F, D or H; M5 by W, F, L or I; S7 by W, A, Y, V, H or S; K8 by W, Y or E; P9 by S or G; V10 by I; and/or, N11 by E. Particularly preferred substitutions to LN02 CDRL1 (WGYYMGSKPVN), selected on the basis of HIV neutralization potency relative to wild-type LN02 (i.e., >1.4-fold increase (e.g., FIG. 1)), are Y3 by W; Y4 by W; S7 by Y or V; K8 by Y; V10 by I; and/or, N11 by E.

[0029] In some embodiments, the LN02M binding agent comprises a modified LN02 CDRL2 (YDDERDS), corresponding to amino acids 49-55 of the LN02M_VL sequence illustrated in FIG. 1 (SEQ ID NO.: 235), and numbered left to right as Y1, D2, D3, E4, R5, D6, and S7, may comprise any one or more, including all, or in some embodiments one or more conservative variants thereof, of the following substitutions: Y1 by W or F; D2 by E; D3 by N, Q, E or Y; E4 by W or D; R5 by Y; D6 by T; and S7 by W, H, D, Y or Q. Particularly preferred substitutions to LN02 CDRL2 (YDDERDS), selected on the basis of HIV neutralization potency relative to wild-type LN02 (i.e., >1.4-fold increase (e.g., FIG. 1)), are D6 by T; and/or S7 by D or Q.

[0030] In some embodiments, the LN02M binding agent comprises a modified LN02 CDRL3 (QVWDSKYEEIY), corresponding to amino acids 88-98 of the LN02M_VL sequence illustrated in FIG. 1 (SEQ ID NO.: 235), and numbered left to right as CDRL3 Q1, V2, W3, D4, S5, K6, Y7, E8, E9, 110, and Y11, may comprise any one or more, including all, or in some embodiments one or more conservative variants thereof, of the following substitutions: Q1 by Y; V2 by I; D4 by E; S5 by A, Y, T, M, H, D and Q; K6 by G, W, R, H, Y, Tor H; Y7 by W; E8 by D, Y, R or H; 110 by W or V; and Y11 by W, Tor F. Particularly preferred substitutions to LN02 CDRL3 (QVWDSKYEEIY), selected on the basis of HIV neutralization potency relative to wild-type LN02 (i.e., >1.4-fold increase (e.g., FIG. 1)), are S5 by Y, H, or Q; K6 by W, or Y; Y7 by W; E8 by Y; and/or 110 by V.

[0031] In some embodiments, an LN02M binding agent can comprise modifications to the LN02 variable heavy and/or variable light chain regions amino acid sequences outside the CDRs, as those CDRs are illustrated in FIG. 1. For instance, in some embodiments, with reference to SEQ ID NO. 234, S19 can be substituted by W, H or R; T21 can be substituted by W, Y or S; S68, D72, T73, S74, K75, or N76 can be substituted by W; N65 can be substituted by S or W; H94 can be substituted by Y; and/or P105 can be substituted by W. Particularly preferred substitutions to the LN02 variable heavy chain (with reference to SEQ ID NO. 234) outside of the CDRs, selected on the basis of HIV neutralization potency relative to wild-type LN02 (i.e., >1.4-fold increase (e.g., FIG. 1)), are S19 by H or R; T21 by Y; and/or S74 by W. In some embodiments, with reference to SEQ ID NO. 235, Q16 can be substituted by E; S48 can be substituted by W, Y, T or F; G56 can be substituted by E; A59 can be substituted by E; H65 can be substituted by N; S68 can be substituted by N; N76 can be substituted by R; V78 can be substituted by E; P79 can be substituted by A; and/or, A80 can be substituted by G. Particularly preferred substitutions to the LN02 variable light chain (with reference to SEQ ID NO. 235) outside of the CDRs, selected on the basis of HIV neutralization potency relative to wild-type LN02 (i.e., >1.4-fold increase (e.g., FIG. 1)), are S48 by T; N76 by R; and/or V78 by E. Any one of more of these substitutions to the LN02 variable heavy and variable light chains (with reference to SEQ ID NOS. 234 and 235, respectively) outside of the CDRs can be included in a binding agent comprising any of the LN02M CDRs described above. Additional conservative substitutions to such amino acid sequences can also be utilized as would be understood by those of ordinary skill in the art.

[0032] In some embodiments, an LN02M binding agent can comprise an LN02M polypeptide modified as illustrated in FIG. 1. In some embodiments, the LN02M binding agent can be a polypeptide comprising the amino acid sequences described in any of FIGS. 6A-E. Preferred LN02M polypeptides, based on the potency data presented in Tables 1-2, are those exhibiting greater neutralizing activity than wild-type LN02 (fold increase indicated in parenthesis), including those comprising the LN02M variable heavy chain regions MH01 (1.59) (SEQ ID NO. 95), MH16 (1.69) (SEQ ID NO. 110), MH22 (1.18) (SEQ ID NO. 116), MH26 (1.40) (SEQ ID NO. 120), MH30 (3.37) (SEQ ID NO. 124), MH32 (1.32) (SEQ ID NO. 126), MH35 (1.91) (SEQ ID NO. 129), MH36 (1.37) (SEQ ID NO. 130), MH37 (1.75) (SEQ ID NO. 131), MH43 (1.90) (SEQ ID NO. 136), MH44 (1.38) (SEQ ID NO. 137), MH48 (2.12) (SEQ ID NO. 141), MH49 (1.71) (SEQ ID NO. 142), MH50 (2.74) (SEQ ID NO. 143), MH51 (2.46) (SEQ ID NO. 144), MH53 (1.45) (SEQ ID NO. 146), MH59 (1.31) (SEQ ID NO. 151), MH61 (1.43) (SEQ ID NO. 153), MH64 (1.52) (SEQ ID NO. 156), MH68 (1.12) (SEQ ID NO. 159), MH73 (1.83) (SEQ ID NO. 163), MH84 (1.16) (SEQ ID NO. 174), MH89 (2.26) (SEQ ID NO. 177), MH91 (1.36) (SEQ ID NO. 178), MH92 (1.45) (SEQ ID NO. 179), MH106 (1.16) (SEQ ID NO. 193), MH107 (2.19) (SEQ ID NO. 194), MH108 (1.91) (SEQ ID NO. 195), MH111 (3.34) (SEQ ID NO. 198), MH112 (2.77) (SEQ ID NO. 199), MH115 (1.41) (SEQ ID NO. 202), MH119 (1.32) (SEQ ID NO. 206), MH120 (1.55) (SEQ ID NO. 207), MH124 (1.67) (SEQ ID NO. 211), MH 131 (1.55) (SEQ ID NO. 218), MH135 (1.60) (SEQ ID NO. 222), MH136 (1.84) (SEQ ID NO. 223), MH138 (1.20) (SEQ ID NO. 225), and/or MH146 (1.65) (SEQ ID NO. 232); and/or the LN02M variable light chain regions ML01 (1.29) (SEQ ID NO. 3), ML02 (1.93) (SEQ ID NO. 4), ML05 (1.45) (SEQ ID NO. 7), ML08 (2.31) (SEQ ID NO. 10), ML10 (1.51) (SEQ ID NO. 12), ML11 (1.25) (SEQ ID NO. 13), ML12 (3.90) (SEQ ID NO. 14), ML31 (5.74) (SEQ ID NO. 31), ML32 (1.38) (SEQ ID NO. 32), ML44 (1.57) (SEQ ID NO. 42), ML49 (1.40) (SEQ ID NO. 47), ML51 (1.10) (SEQ ID NO. 48), ML52 (1.36) (SEQ ID NO. 49), ML60 (1.17) (SEQ ID NO. 56), ML71 (1.38) (SEQ ID NO. 66), ML73 (1.20) (SEQ ID NO. 68), ML74 (1.10) (SEQ ID NO. 69), ML79 (1.46) (SEQ ID NO. 74), ML84 (1.59) (SEQ ID NO. 79), ML85 (9.94) (SEQ ID NO. 80), ML92 (4.79) (SEQ ID NO. 87), and ML94 (6.42) (SEQ ID NO. 89); and/or conservatively substituted variants and/or fragments thereof. Particularly preferred LN02M binding agents are those comprising LN02 MH30 (SEQ ID NO. 95), LN02 MH111 (SEQ ID NO. 95), LN02 ML12 (SEQ ID NO. 95), LN02 ML31 (SEQ ID NO. 95), LN02 ML85 (SEQ ID NO. 95), LN02 ML92 (SEQ ID NO. 95), and LN02 ML94 (SEQ ID NO. 95), each of which exhibits greater than three-fold improved neutralization potency against the BaL virus relative the LN02 wild type control (Tables 1-2), and/or conservatively substituted variants and/or fragments thereof.

[0033] A binding agent of this disclosure can comprise any of the modified CDRH1, CDRH2, CDRH3, CDRL1, CDRL2, and CDRL3 amino acid sequences described above, or conservatively substituted variants thereof. Such a binding agent may be a polypeptide, such as an antibody, as described in more detail below.

[0034] A binding agent of this disclosure may comprise, for example, any one or more of the amino acid sequences (i.e., polypeptide sequences) of SEQ ID NOS. 3-92, SEQ ID NOS. 95-233, and/or those shown in FIGS. 1 and 6A-E; and/or or a conservatively substituted variant thereof. Fragments and/or derivatives (e.g., comprising substituted amino acids, such as conservative substitutions) thereof are also disclosed. In some embodiments, a binding agent of this disclosure may comprise one or more (i.e., one, two, three, four, five, six or seven) of SEQ ID NOS. 3-92, SEQ ID NOS. 95-233, and/or those shown in FIGS. 6A-E, provided the binding agent exhibits the functional characteristics described herein (e.g., as shown in FIGS. 2-5 and the Examples section). In preferred embodiments, the binding agent comprises at least one of the modified CDRs illustrated in FIG. 1; at least one of SEQ ID NOS. 3-92 and at least one of SEQ ID NOS. 95-233; and/or at least one of the amino acid sequences illustrated in FIGS. 6A-E; even more preferably wherein such LN02M binding agents exhibit one or more of the properties presented in any of Tables 1-3 and/or FIGS. 2-5, and/or described in the Examples section herein. Together, the modified LN02 amino acid sequences disclosed herein can be referred to as the “LN02M variable region and/or CDR and/or non-CDR amino acid sequences”, which refers to the LN02M amino acid sequences illustrated in FIGS. 1 and 6A-E as well as SEQ ID NOS. 3-92 and 95-233. The LN02M variable region and/or CDR and/or non-CDR amino acid sequences typically include a sequence of at least six amino acid residues (e.g., a sequence of at least any of seven, eight, nine, ten, 11, 12, 13, 14 or 15 amino acid residues).

[0035] Combinations of LN02 CDRs with LN02M CDRs, as well as modified amino acid sequences outside of CDRs, can be combined with one another as desired, typically while maintaining the functional characteristics such as HIV pseudo-virus neutralization (as illustrated by Tables 1-3 and 7-14, FIGS. 2-5 and 9, and the Examples). Exemplary combinations are described in Table 4, and also include combinations of: LN02M variable light chain ML01 (SEQ ID NO. 3) with LN02M variable heavy chain MH02 (SEQ ID NO. 96), MH04 (SEQ ID NO. 98), MH22 (SEQ ID NO. 116), MH23 (SEQ ID NO. 117), MH30 (SEQ ID NO. 124), MH31 (SEQ ID NO. 125), MH35 (SEQ ID NO. 129), MH36 (SEQ ID NO. 130), and/or MH37 (SEQ ID NO. 131); LN02M variable light chain ML12 (SEQ ID NO. 14) with LN02M variable heavy chain MH02 (SEQ ID NO. 96), MH04 (SEQ ID NO. 98), MH22 (SEQ ID NO. 116), MH23 (SEQ ID NO. 117) MH30 (SEQ ID NO. 124), MH31 (SEQ ID NO. 125), MH35 (SEQ ID NO. 129), MH36 (SEQ ID NO. 130), and/or MH37 (SEQ ID NO. 131); LN02M variable light chain ML23 (SEQ ID NO. 24) with LN02M variable heavy chain MH31 (SEQ ID NO. 125), MH43 (SEQ ID NO. 136), MH48 (SEQ ID NO. 141), and MH51 (SEQ ID NO. 144); LN02M variable light chain ML30 (SEQ ID NO. 30) with LN02M variable heavy chain MH31 (SEQ ID NO. 125), MH43 (SEQ ID NO. 136), MH48 (SEQ ID NO. 141), or MH51 (SEQ ID NO. 144); LN02M variable light chain ML31 (SEQ ID NO. 31) with LN02M variable heavy chain MH02 (SEQ ID NO. 96), MH04 (SEQ ID NO. 98), MH22 (SEQ ID NO. 116), MH23 (SEQ ID NO. 117), MH30 (SEQ ID NO. 124), MH31 (SEQ ID NO. 125), MH35 (SEQ ID NO. 129), MH36 (SEQ ID NO. 130), MH37 (SEQ ID NO. 131), MH43 (SEQ ID NO. 136), MH48 (SEQ ID NO. 141), or MH51 (SEQ ID NO. 144); LN02M variable light chain ML32 (SEQ ID NO. 32) with LN02M variable heavy chain MH31 (SEQ ID NO. 125); LN02M variable light chain ML85 (SEQ ID NO. 80) with LN02M variable heavy chain MH31 (SEQ ID NO. 125), MH35 (SEQ ID NO. 129), MH43 (SEQ ID NO. 136), MH49 (SEQ ID NO. 142), MH60 (SEQ ID NO. 152), MH76 (SEQ ID NO. 166), MH111 (SEQ ID NO. 198), or MH112 (SEQ ID NO. 199); and/or conservatively substituted variants and/or fragments thereof. Particularly preferred LN02M binding agents are LN02 ML8542 (SEQ ID NO. 99) and LN02 MX048 (a combination of LN02 ML85 (SEQ ID NO. 80) and LN02 MH31 (SEQ ID NO. 125) (Table 4); and/or conservatively substituted variants and/or fragments thereof. Other combinations are also contemplated herein as will be understood by those of ordinary skill in the art.

[0036] In some embodiments, the binding agent can be a monoclonal antibody (mAb) or a fragment or derivative thereof. In some embodiments, the binding agent may be an HIV-binding fragment of such a monoclonal antibody (mAb). In some embodiments, one or more LN02M CDR(s), and/or an amino acid sequence comprising such CDR(s), and in some embodiments other modified sequences present outside the CDR regions (see, e.g., FIG. 1) cloned into an IgG (e.g., IgG1 or IgG3) backbone (e.g., framework) using standard techniques. Other suitable embodiments may be derived by those of ordinary skill in the art from this disclosure.

[0037] It is preferred that the binding agent (e.g., antibody, or the antigen binding fragment thereof), comprises one or more amino acid sequences having at least 70%, at least 75%, at least 80%, at least 85%, at least 88%, at least 90%, at least 92%, at least 95%, at least 96%, at least 97%, at least 98% or at least 99% identity to at least one LN02M variable region and/or CDR and/or non-CDR amino acid sequences (e.g., the modified CDRs illustrated in FIG. 1; at least one of SEQ ID NOS. 3-92 or 491-699 and at least one of SEQ ID NOS. 95-233 or 248-482; and/or at least one of the amino acid sequences illustrated in FIG. 6A-E, 7A-E, or 8A-F), and even more preferably wherein a LN02M binding agent further exhibits one or more of the properties presented in any of Tables 1-3 and/or 7-14 and/or FIGS. 2-5 and/or 9, and/or described in the Examples section herein. As discussed below, identities of less than 100% may result from the natural or synthetic substitution of one or more amino acids with another amino acid(s), as in a conservative substitution (see, e.g., Table 4). Various combinations of the LN02M variable region and/or CDR and/or non-CDR amino acid sequences are also contemplated and can be useful for similar purposes (e.g., as an anti-HIV antibody) as may ascertained by one of ordinary skill in the art using the techniques described herein or as may be otherwise available to those of ordinary skill in the art. In preferred embodiments, the LN02M binding agents described herein can bind HIV and/or cells infected by HIV and/or expressing HIV proteins. In some especially preferred embodiments, the LN02M binding agents described herein can neutralize HIV (e.g., perform as neutralizing binding agents (e.g., antibodies)). In preferred embodiments, the LN02M binding agents can both bind HIV and/or cells infected by HIV and/or expressing HIV proteins, and neutralize HIV.

[0038] The LN02M variable region and/or LN02M CDR and/or non-CDR amino acid sequences may be used in combination with one or more other variable region/CDR amino acid sequences available to those of ordinary skill in the art. Such variable region/CDR amino acid sequences may alternatively and/or also be adjoined to one or more types of constant region polypeptides of an antibody molecule. For instance, the LN02M CDRs can be adjoined to or associated with the constant regions of any antibody molecule of the same or a different species (e.g., human, goat, rat, sheep, chicken) and/or antibody subtype of that from which the CDR amino acid sequence was derived. For instance, an exemplary binding agent LN02M may be, or may be derived from, one having about the same neutralizing activity and/or binding the same or similar epitopes and/or exhibiting about the same affinity as another binding agent comprising one or more LN02M variable region and/or CDR and/or non-CDR amino acid sequences. The binding agent may comprise an antibody heavy and/or a light chain that each comprises one or more constant and/or variable regions. Any of the amino acid sequences described herein (e.g., the LN02M variable region and/or CDR and/or non-CDR amino acid sequences), and/or any fragments and/or derivatives thereof, may also be combined with any other variable region and/or CDR in any order and/or combination to form new binding agents, e.g., hybrid and/or fusion binding agents, and/or inserted into other heavy and/or light chain variable regions using standard techniques.

[0039] This disclosure also provides for the use of such binding agents to isolate, identify, and/or target HIV and/or cells harboring and/or infected by HIV and/or expressing HIV antigens. In certain embodiments, such binding agents may be reactive against HIV antigens such as proteins expressed on the surface of cells. In some embodiments, the binding agent(s) is an antibody (antibodies). The term “antibody” or “antibodies” may refer to whole or fragmented antibodies in unpurified or partially purified form (e.g., hybridoma supernatant, ascites, polyclonal antisera) or in purified form. The antibodies may be of any suitable origin or form including, for example, murine (e.g., produced by murine hybridoma cells), or expressed as humanized antibodies, chimeric antibodies, human antibodies, and the like. For instance, antibodies may be wholly or partially derived from human (e.g., IgG (IgG1, IgG2, IgG3, IgG4), IgM, IgA (IgA1 and IgA2), IgD, and IgE), canine (e.g., IgGA, IgGB, IgGC, IgGD), chicken (e.g., IgA, IgD, IgE, IgG, IgM, IgY), goat (e.g., IgG), mouse (e.g., IgG, IgD, IgE, IgG, IgM), pig (e.g., IgG, IgD, IgE, IgG, IgM), and/or rat (e.g., IgG, IgD, IgE, IgG, IgM) antibodies, for instance. Methods of preparing, utilizing and storing various types of antibodies are well-known to those of skill in the art and would be suitable in practicing the present invention (see, for example, Harlow, et al. Antibodies: A Laboratory Manual, Cold Spring Harbor Laboratory, 1988; Harlow, et al. Using Antibodies: A Laboratory Manual, Portable Protocol No. 1, 1998; Kohler and Milstein, Nature, 256:495 (1975)); Jones et al. Nature, 321:522-525 (1986); Riechmann et al. Nature, 332:323-329 (1988); Presta (Curr. Op. Struct. Biol., 2:593-596 (1992); Verhoeyen et al. (Science, 239:1534-1536 (1988); Hoogenboom et al., J. Mol. Biol., 227:381 (1991); Marks et al., J. Mol. Biol., 222:581 (1991); Cole et al., Monoclonal Antibodies and Cancer Therapy, Alan R. Liss, p. 77 (1985); Boerner et al., J. Immunol., 147(1):86-95 (1991); Marks et al., Bio/Technology 10, 779-783 (1992); Lonberg et al., Nature 368 856-859 (1994); Morrison, Nature 368 812-13 (1994); Fishwild et al., Nature Biotechnology 14, 845-51 (1996); Neuberger, Nature Biotechnology 14, 826 (1996); Lonberg and Huszar, Intern. Rev. Immunol. 13 65-93 (1995); as well as U.S. Pat. Nos. 4,816,567; 5,545,807; 5,545,806; 5,569,825; 5,625,126; 5,633,425; and, 5,661,016). In certain applications, the antibodies may be contained within hybridoma supernatant or ascites and utilized either directly as such or following concentration using standard techniques. In other applications, the antibodies may be further purified using, for example, salt fractionation and ion exchange chromatography, or affinity chromatography using Protein A, Protein G, Protein A/G, and/or Protein L ligands covalently coupled to a solid support such as agarose beads, or combinations of these techniques. The antibodies may be stored in any suitable format, including as a frozen preparation (e.g., −20° C. or −70° C.), in lyophilized form, or under normal refrigeration conditions (e.g., 4° C.). When stored in liquid form, for instance, it is preferred that a suitable buffer such as Tris-buffered saline (TBS) or phosphate buffered saline (PBS) is utilized. In some embodiments, the binding agent may be prepared as an injectable preparation, such as in suspension in a non-toxic parenterally acceptable diluent or solvent. Suitable vehicles and solvents that may be utilized include water, Ringer's solution, and isotonic sodium chloride solution, TBS and/or PBS, among others. Such preparations may be suitable for use in vitro or in vivo may be prepared as is known in the art and the exact preparation may depend on the particular application.

[0040] The binding agents described herein are not, however, in any way limited to antibodies (i.e., whole antibodies). For example, the binding agent may be any compound exhibiting similar binding properties as another (e.g., a mimetic). For example, an exemplary binding agent may be one that binds HIV and/or can compete with another binding agent having specificity therefor (e.g., a monoclonal antibody such as a LN02M antibody). In some embodiments, the mimetic may exhibit substantially the same affinity in binding assays as the binding agent (e.g., monoclonal antibody) to which it is being compared. The affinity a particular binding agent may be measured by any suitable assay including but not limited to FACS staining of cell surface HIV antigens (e.g., polypeptides). One binding agent may be said to have “substantially the same affinity” as another where the measurements (e.g., nm) are within about any of 1-20, 1-5, 5-10, 10-15, or 15-20 percent of one another. Exemplary mimetics may include, for example, organic compounds that specifically bind HIV, or an affibody (Nygren, et al. FEBS J. 275 (11): 2668-76 (2008)), affilin (Ebersbach, et al. J. Mol. Biol. 372 (1): 172-85 (2007)), affitin (Krehenbrink, et al. J. Mol. Biol. 383 (5): 1058-68 (2008)), anticalin (Skerra, A. FEBS J. 275 (11): 2677-83 (2008)), avimer (Silverman, et al. Nat. Biotechnol. 23 (12): 1556-61 (2005)), DARPin (Stumpp, et al. Drug Discov. Today 13 (15-16): 695-701 (2008)), Fynomer (Grabulovski, et al. J. Biol. Chem. 282 (5): 3196-3204 (2007)), Kunitz domain peptide (Nixon, et al. Curr. Opin. Drug Discov. Devel. 9 (2): 261-8 (2006)), and/or a monobody (Koide, et al. Methods Mol. Biol. 352: 95-109 (2007)). Other mimetics may include, for example, a derivative of an antibody such as, for example, an F_{ab}, F_{ab2}, Fab′ single chain antibody, Fᵥ, single domain antibody, mono-specific antibody, bi-specific antibody, tri-specific antibody, multi-valent antibody, chimeric antibody, canine-human chimeric antibody, canine-mouse chimeric antibody, antibody comprising a canine Fc, humanized antibody, human antibody, caninized, CDR-grafted antibody, shark antibody, nanobody, camelid antibody, microbody, and/or intrabody; and/or derivative thereof. Other binding agents are also provided herein as would be understood by one of ordinary skill in the art.

[0041] Any method known to those of ordinary skill in the art may be used to generate binding agents having specificity for (e.g., binding to) HIV. For instance, to generate and isolate monoclonal antibodies an animal such as a mouse may be administered (e.g., immunized) with one or more HIV proteins. Animals exhibiting serum reactivity to HIV expressed on activated human T lymphocytes (as determined by, for instance, flow cytometry and/or microscopy) may then be selected for generation of anti-HIV hybridoma cell lines. This may be repeated for multiple rounds. Screening may also include, for instance, affinity binding and/or functional characterization to identify the binding agent as being specific for HIV. In some embodiments, such as in the Examples herein, human beings may be screened for the expression of antibodies against HIV. In some embodiments, plasma samples of human beings infected by HIV may be screened to identify persons expressing anti-HIV antibodies, and in particular, neutralizing antibodies. Neutralizing antibody-producing cells of such persons may then be isolated, followed by the isolation and characterization of the antibodies produced thereby (e.g., as in the examples herein). A neutralizing antibody may be one that exhibits the ability to neutralize, or inhibit, infection of cells by HIV. In general, a neutralization assay typically measures the loss of infectivity of the virus through reaction of the virus with specific antibodies. Typically, a loss of infectivity is caused by interference by the bound antibody with any of the virus replication steps including but not limited to binding to target cells, entry, and/or viral release. The presence of un-neutralized virus is detected after a predetermined amount of time, e.g., one, two, three, four, five, six, seven, eight, nine, 10, 12 or 14 days, by measuring the infection of target cells using any of the systems available to those of ordinary skill in the art (e.g., a luciferase-based system). A non-limiting example of a neutralization assay may include combining a given amount of a virus or pseudovirus (see below) and different concentrations of the test or control (typically positive and negative controls assayed separately) antibody or antibodies are mixed under appropriate conditions (e.g., one (1) hour at room temperature) and then inoculated into an appropriate target cell culture (e.g., TZM-bl cells). For instance, binding agent-producing cells (e.g., B cells producing antibodies) may be assayed for the production of HIV-1 neutralizing antibodies by seeding such cells in separate plates as single cell micro-cultures on human feeder cells in the presence of Epstein-Barr Virus (EBV) (which also stimulate polyclonally memory B cells), a cocktail of growth factors (e.g., TLR9 agonist CpG-2006, IL-2 (1000 IU/ml), IL-6 (10 ng/ml), IL-21 (10 ng/ml), and anti-B cell receptor (BCR) goat antibodies (which trigger BCRs). After an appropriate time (e.g., 14 days), supernatants of such cultures may tested in a primary luciferase-based screening system using two or more representative HIV-1 viruses or pseudoviruses that productively infect such cells. The pseudoviruses may be incubated with B cell culture supernatants for an appropriate time and temperature (e.g., one (1) h at 37% (5% CO2)) before the addition of host cells (e.g., 3000 TZM-bl cells). Incubation for an appropriate time (e.g., 72 hours) may then follow, after which the supernatant may be removed and Steadylite reagent (Perkin Elmer) added (e.g., 15 μl). Luciferase activity may then determined (e.g., five minutes later) on a Synergy microplate luminometer (BioTek). Decreased luciferase activity relative to a negative control typically indicates virus neutralization. Neutralization assays such as these, suitable for analyzing binding agents of this disclosure, are known in the art (see, e.g., Montefiori, D. C. Curr. Protocol. Immunol. Chapter 12, Unit 12.11 (2005); Edmonds, et al. Virology, 408(1): 1-13 (2010); Seaman, et al. J. Virol. 84(3): 1439-1452 (2010); Pace, et al. PNAS USA, 110(33): 13540-13545 (2013)). In some embodiments, test samples may be screened for the presence of antibodies able to neutralize a panel of HIV pseudoviruses (e.g., eight (8) HIV-1 pseudoviruses from the Global Panel of HIV-1 reference strains as conducted in the examples herein (those pseudoviruses being TRO.11 (B), 246F3 (AC), BJOX2000 (CRF007_BC), CE1176 (C), CH119 (CRF07_BC), CNE55 (CRF01_AE), 25710 (C), and X1632 (see, e.g., FIGS. 2-5) but not of the control virus SVA-MLV at about 10 μg/ml or less (e.g., FIG. 5); DeCamp, A. et al. Global panel of HIV-1 Env reference strains for standardized assessments of vaccine-elicited neutralizing antibodies. J Virol 88, 2489-2507 (2014)). Neutralization of a larger panel of psuedoviruses may also be tested; for instance, de Camp et al. describe a group of 12 pseudoviruses (also known as HIV-1 Env Reference Strains): 398F1, 25710, CNE8, TRO11, X2278, BJOX2000, X1632, CE1176, 246F3, CH119, CE0217, and CNE55. In some embodiments, a panel of ten HIV isolates may be tested and a bNab may be identified as one that neutralizes six, seven, eight, nine members of a panel of nine pseudoviruses; or six, seven, eight, nine, 10, 11 or 12 members of a panel of 12 pseudoviruses. Screening of larger panels of such pseudoviruses (e.g., a panel of 57 pseudoviruses as in the examples herein) may also be carried out. In one embodiment, then, an exemplary panel of 57 pseudoviruses used in the examples against which test samples may be tested for neutralizing antibodies may include, for instance, those shown in FIGS. 2-5 (e.g., Glade A (T/F), Glade B, Glade B (T/F), Glade BC, Glade C, Glade C (T/F), Glade E (T/F) or Glade G). In some embodiments, neutralization may be determined as a measure of the concentration (e.g., μg/ml) of monoclonal antibody capable of neutralizing any of about 50%, 60%, 70%, 80%, 90%, 95%, or 99% of viral infection (as may be measured by percent neutralization and/or by determining an “IC₅₀” and/or “IC₈₀” value). In some embodiments, a binding agent may be considered neutralizing if it is able to neutralize 50% of viral infection at a concentration of, for instance, about any of 10⁻⁵, 10⁻⁴, 10⁻³, 10⁻², 10¹, 10°, 10¹, 10², or 10³ μg/ml (e.g., an IC₈₀ value as shown in in FIGS. 2-5). In some embodiments, the ability of a neutralizing antibody to neutralize viral infection may be expressed as a percent neutralization (e.g., 10%, 20%, 30%, 40%, 50%, 60%, 70%, 80%, 90%, 95%, or 99% (e.g., as in FIG. 5)). And in some embodiments, as in the Examples herein, the ability of a neutralizing antibody to neutralize viral infection may be expressed as, and, in preferred embodiments, the IC₅₀ and/or IC₈₀ value is below 25 μg/ml, and is even more preferably below about any of 15, 10, 5, 2, 1, 0.5, 0.25, 0.1, 0.05, or 0.01 μg/ml (see, e.g., FIGS. 2-5). Other measures of neutralization may also be suitable as may be determined by those of ordinary skill in the art.

[0042] In some embodiments, the binding agents described herein may be broadly neutralizing antibodies (bNabs) identified in biological samples (e.g., plasma) obtained from HIV-infected persons. As mentioned above and shown in the examples herein, such bNabs may be identified by testing plasma samples of patients chronically infected by HIV (preferably those naïve to antiretroviral therapy) for the ability to neutralize multi-Glade HIV isolates (e.g., initially using a nine or 12-member panel and then a larger panel (e.g., 57 members) of pseudoviruses)). In some embodiments, the samples may be derived from patients known to be “Elite Controllers” with viremia <50 HIV RNA copies per ml of plasma. Screening procedures such as these may result in the identification of patients that may serve as lymph node donors for the subsequent isolation and characterization of B cells producing bNabs. In carrying out such screening assays, neutralizing activity is typically compared to a negative control such as murine leukemia virus (MLV) pseudovirus.

[0043] In some embodiments, germinal center and memory IgG B cells of patients expressing neutralizing binding agents (e.g., antibodies) may be isolated and further studied. In some embodiments, the cells may be sorted separately according to IgG (e.g., IgA and IgM negative cells), CD19, and CD38 expression (germinal center B cells are CD38 positive) and interrogated for the production of HIV-1 neutralizing antibodies. For instance, highly pure IgG memory B cells and IgG germinal cells may be seeded in separate plates as single cell micro-cultures on human feeder cells in the presence of Epstein-Barr Virus (EBV) (which also stimulate polyclonally memory B cells) and a cocktail of growth factors and the like (e.g., composed TLR9 agonist CpG-2006, IL-2 (1000 IU/ml), IL-6 (10 ng/ml), IL-21 (10 ng/ml), and anti-BCR goat antibodies (B cell receptor (BCR) triggering)). Supernatants of such cultures (e.g., from day 14 cultures) may then be tested in a primary screening (e.g., using a 384-well based HIV-1 pseudoviruses neutralization assay using in parallel two strains, CE1176 and BJOX2000, representative of Glade C and CRF07, as shown in the examples herein). Neutralization assays may be carried out using any suitable host cells (e.g., TZM-bl cells (Seaman, et al. J. Virol. 84(3): 1439-52 (2010); NIH AIDS Reagent Program Catalog Number 8129)). HIV-1 pseudoviruses resulting in a significant output relative light units (RLU) (e.g., of 50-100×10⁴ RLU) (i.e., indicating productive infection of cells) may then incubated with B cell culture supernatants for an appropriate time and temperature (e.g., one (1) h at 37% (5% CO2)) before the addition of host cells (e.g., 3000 TZM-bl cells). Incubation for an appropriate time (e.g., 72 hours) typically follows, after which the supernatant may be removed and Steadylite reagent (Perkin Elmer) added (e.g., 15 μl). Luciferase activity may then be detected (e.g., five minutes later) on a Synergy microplate luminometer (BioTek). Decreased luciferase activity indicates a lesser amount of virus being released by the cells and virus neutralization. For instance, if the base RLU for a particular pseudovirus is 50-100×10⁴ RLU, a neutralizing antibody may be determined to decrease the RLU for that pseudovirus to 25-50×10⁴ RLU (i.e., a 50% decrease), or less. Using such systems, supernatants capable of cross-neutralizing strains may be identified, further harvested, and tested for their ability to neutralize other pseudoviruses.

[0044] The antibodies derived from such neutralizing antibody-containing cultures may then be further characterized by determining the amino acid and nucleotide sequences of the antibody variable and complementarity determining regions (CDRs) regions. Using these techniques, the HIV-neutralizing binding agent termed “LN02” was identified as an IgG3-type fully human monoclonal antibody having the CDR, VH and VL sequences shown in FIG. 1 (comprising SEQ ID NOS. 234, 235). As described herein, variants of LN02 have now been developed and shown to exhibit surprising functional properties (e.g., increased HIV pseudovirus neutralization). In some embodiments, the variable heavy chain (V_{H}) and variable light chain (VI) genes of a binding agent may then be cloned into an IgG expression vector of the same or a different isotype. As shown in the examples, for instance, nucleic acids encoding LN02M variable region and/or CDR and/or non-CDR amino acid sequences were cloned into IgG1 backbone, and the recombinant IgG1-based antibody was produced by transfecting appropriate host cells (e.g., Expi293F cells). The antibody full-length IgG1-based antibody may then be purified using standard techniques (e.g., a full-length IgG1-based antibody may be purified using a recombinant protein-A column (GE-Healthcare)). The recombinantly-produced IgG1 antibody may then be tested against any of a panel of pseudoviruses such as any of those described herein (e.g., the Global Panel of nine (9) HIV-1 reference pseudoviruses used in the examples) on an appropriate host cell (e.g., TZM-bl cells). In preferred embodiments, the binding agent will exhibit the ability to neutralize a majority (i.e., at least about 50% or greater) of the pseudovirus panel members (e.g., comprising nine, 12 or 118 members) without neutralizing a negative control virus (e.g., MLV pseudovirus). It is preferred that the binding agent exhibit the ability to neutralize a majority of such viruses (e.g., neutralization of greater than about 50%, such as any of about 60%, 70%, 80%, 90%, 95%, 99%, or 100%) with IC₅₀ and/or IC₈₀ values considered neutralizing (see below). For example, in some embodiments, a binding agent of this disclosure may exhibit neutralization of HIV-1 pseudoviruses TRO.11 (Clade B), 25710 (Clade C), CE1176, BJOX (CRF07_BC), CH119 (CRF07_BC), 246-F3 (Clade AC), X1632 (Clade G), CNE55 (CRF01_AE), and/or CD0217 (Clade C). In some embodiments, neutralization of the HIV-1 pseudoviruses viruses may be observed where the antibody concentration is from 10⁻²−10° μg/ml (i.e., 10 ng/ml to 1 μg/ml), or between 10⁰-10¹ μg/ml (i.e., 1-10 μg/ml). In some such embodiments, the percent neutralization by the binding agent is at least about 50%. In some embodiments, infection of one HIV-1 isolate is considered neutralized by a binding agent (e.g., antibody) at an IC₅₀ and/or IC₈₀ of less than 25 μg/ml, if infection of at least one isolate of this isolate is neutralized with an IC₅₀ of less than 25 μg/ml. In some embodiments, the binding agent may be considered neutralizing where HIV-1 pseudoviruses listed in are considered neutralized at an IC₅₀ of less than 25 μg/ml, such as about 10 μg/ml, 9 μg/ml, 8 μg/ml, 7 μg/ml, 6 μg/ml, 5 μg/ml, 4 μg/ml, 3 μg/ml, 2 μg/ml, 1 μg/ml, 0.9 μg/ml, 0.8 μg/ml, 0.7 μg/ml, 0.6 μg/ml, 0.5 μg/ml, 0.4 μg/ml, 0.3 μg/ml, 0.2 μg/ml, 0.1 μg/ml, 0.09 μg/ml, 0.08 μg/ml, 0.07 μg/ml, 0.06 μg/ml, 0.05 μg/ml, 0.04 μg/ml, 0.03 μg/ml, 0.02 μg/ml, or 0.01 μg/ml; and/or an IC₅₀ of between about 0.001 to about 10 μg/ml. In preferred embodiments, the binding agent may neutralize HIV-1 pseudovirus strains TRO.11 (Clade B), 25710 (Clade C), CE1176, BJOX (CRF07_BC), CH119 (CRF07_BC), 246-F3 (Clade AC), X1632 (Clade G), CNE55 (CRF01_AE), and/or CD0217 (Clade C); and/or, of ID MS208.A1, Q23.17, Q769.d22, Q842.d12, Q259.d2.17, 0260.v5.c36, 191955_A11, 191084 B7-19, TRO.11, 6535.3, REJ04541.67, SC422661.8, QH0692.42, TRJ04551.58, RHPA4259.7, PVO.4, SCO5 8C11 2344, CNE17, CNE19, CNE20, CNE21, Du422.1, CAP210.2.00.E8, ZM249M.PB6, HIV-001428-2.42, ZM214M.PL15, CAP45.2.00.G3, Ce704809221_163, Ce 1 1 76_A3, ZM247v1(Rev-), Ce0682_E4, 249M B10, 246F Cl G, and/or BF1266.431a; at, for example an IC₅₀ or IC₈₀ of less than or about 1 μg/ml (FIGS. 2-4, 9, Tables 7A, 7B, and/or 8A through 8M). It is further preferred that the binding agent not exhibit Glade-dependency. For instance, in some embodiments, the binding agent may exhibit the ability to neutralize pseudoviruses of HIV-1 Clades including but not limited to Glade A (T/F), Glade B, Glade B (T/F), Glade BC, Glade C, Glade C (T/F), Glade E (T/F), and/or Glade G. In some preferred embodiments, the binding agent may neutralize at least one pseudovirus in each of clades A, A(T/F), B, B (T/F), BC, C, C (T/F), and G at an IC₅₀ or IC₈₀ of less than or about 1 μg/ml. In some preferred embodiments, the binding agent may neutralize at least one pseudovirus in each of clades A, A(T/F), B, B (T/F), BC, C, C (T/F) at an IC₅₀ or IC₈₀ of less than or about 0.5 μg/ml. In some preferred embodiments, the binding agent may neutralize at least one pseudovirus in each of clades A, A(T/F), B, B (T/F), BC, C, and C (T/F) at an IC₈₀ of less than or about 1 μg/ml. In some embodiments, the binding agent comprises any one or more of these properties and one or more of the LN02M variable region and/or CDR and/or non-CDR amino acid sequences.

[0045] In some embodiments, the binding agents may be tested for neutralization capacity against HIV reference pseudoviruses (e.g., the above-described Global Panel of nine (9) HIV-1 reference pseudoviruses) using cells expressing or not expressing one or more types of Fc receptors (e.g., parental TZM-bl cells and TZM-bl cells expressing Fc-gamma receptor I (CD64) as in the examples; see e.g. Perez, et al. Utilization of immunoglobulin G Fc receptors by human immunodeficiency virus type 1: a specific role for antibodies against the membrane-proximal external region of gp41. J Virol 83, 7397-7410 (2009); NIH AIDS Reagent Program Catalog No. 11798). Enhanced neutralizing activity in cells expressing Fc receptors may provide antibodies a kinetic advantage for virus inhibition. This kinetic advantage could be unique to antibodies, whose epitopes are thought to be difficult to access or exposed for only a short time on intermediate conformations of the Env protein during an early stage of fusion. Fc-gamma receptors could also potentially facilitate HIV-1 neutralization is phagocytosis, thereby increasing neutralization capacity of the antibodies. To this point, HeLa cells, from which the TZM-bl cell line was constructed, are known to exhibit properties of nonprofessional phagocytes. Thus, it is possible that TZM-bl cells were converted to professional phagocytic cells by introducing Fc-gamma receptor on their surface. Any Fc-gamma-receptor-mediated antiviral effects on HIV-1 neutralizing antibodies, whether by entry inhibition or phagocytosis, might be beneficial in HIV treatment and vaccine regimens. Fc-gamma receptors are rarely expressed on CD4+ lymphocytes, but several other HIV-1-susceptible cell types express multiple Fc-gamma receptors and are involved in sexual transmission and the early establishment of long-lived viral reservoirs. In particular, macrophages are among the first infection-susceptible cells that the virus encounters after mucosal exposure, and are thought to serve as a long-lived virus reservoir in chronic infection. Macrophages, as well as certain subsets of monocytes and dendritic cells, are known to express multiple Fc-gamma receptors. It is also important to mention that Fc-gamma receptors play a role in regulating adaptive immunity and peripheral tolerance, by facilitating antigen uptake, antigen presentation, cell activation and B cell tolerance. Thus, is some embodiments, the binding agents described herein may be used in conjunction with agents that induce and/or enhance Fc receptor expression, including the introduction of nucleic acids encoding one or more Fc receptors with or in conjunction with treatment by the binding agents described herein.

[0046] The specificity of the binding agents described herein may be determined using any of the many techniques available to those of ordinary skill in the art. For instance, as shown in the examples herein, the specificity of a binding agent (e.g., IgG1 LN02 antibody), with respect to particular epitopes, may be ascertained using a panel of pseudoviruses (e.g., CAP45) that encode mutations in the HIV envelope gene. For instance, modifications can be made to HIV envelope protein (Env) to produce modified Env proteins (mEnv) and each binding agent (e.g., antibody) tested for its ability to bind to the various mEnv proteins. An exemplary HIV-1 envelope amino acid sequence that can be used is that of the CAP45 pseudovirus (GenBank Accession No μF203962; NCBI GenPept Accession No.

[0047] ABQ02701.1; SEQ ID NO.: 237) and/or the HXB2 Env sequence (SEQ ID NO.: 238 (GenBank Accession No. MF944225.1, protein_id=ATG88205.1)) as shown below (with exemplary amino acids that could be modified indicated in bold and underlined):

| (CAP45; SEQ ID NO. 237) | |
|---|---|
| 1 | MGVRGILGNW PQWWIWSILG FWMLIICRVM GNLWVTVYYG VPVWKEAKAT LFCASDARAY |
| 61 | EKEVHNVWAT HACVPTDPNP QEIYLG [symbol] VTE NFNMWKNDMV DQMHEDIISL WDQSLKPCVK |
| 121 | LTPLCVTLRC TNATINGSLT EEVKNCSFNI TTELRDKKQK AYALFYRPDV VPLNKNSPSG |
| 181 | NSSEYILINC NTSTITQACP KVSFDPIPIH YCAPAGYAIL KCNNKTFNGT GPCNNVSTVQ |
| 241 | CTHGIKPVVS TQLLLNGSLA EEDIIIKSEN LTNNIKTIIV HLNKSVEIVC RRPNNNTRKS |
| 301 | IRIGPGQAFY ATNDIIGDIR QAHCNINNST WNRTLEQIKK KLREHFLNRT IEFESPSGGD |
| 361 | LEVTTHSFNC GGEFFYCNTT RLFKWSSNVT NDTITIPCRI KQFINMWQGV GRAMYAPPIE |
| 421 | GNITCNSSIT GLLLTRDGGK TDRNDTEIFR PGGGNMKDNW RNELYKYKVV EIKPLGVAPT |
| 481 | [symbol] RR [symbol] V [symbol] [symbol] R [symbol] G [symbol] [symbol] GFLGAAGST MGAASITLTV QARQLLSGIV QQQSNLLRAI |
| 541 | EAQQHMLQLT VWGIKQLQTR VLAIERYLKD QQLLGLWGCS GKLICTTNVP WNSSW [symbol] NKS [symbol] |
| 601 | TDIWD [symbol] MTWI QWDREISNYS NTIYKLLEDS QNQQEQNEKD LLALDSWNNL WNWFNIT [symbol] WL |
| 661 | WYIKIFIMII GGLIGLRIIL GVLSIVKRVR QGYSPLSFQT LTPNPRGLDR LGRIEEEGGE |
| 721 | QDKDRSIRLV NGFLALAWED LRSLCLFSYH RLRDFILIAV RAVELLGSSS LRGLQRGWEA |
| 801 | LKYLGSLLQY WGLELKKSAI NLLDTVAIAV AEGTDRIIEL IQRICRAIRN IPRRIRQGFE |
| 861 | AALL |
| (HXB2; SEQ ID NO. 238) | |
| 1 | MRVKEKYQHL WRWGWRWGTM LLGMLMICSA TEKLWVTVYY GVPVWKEATT TLFCASDAKA |
| 61 | YDTEVHNVWA THACVPTDPN PQEVVLV [symbol] VT ENFNMWKNDM VEQMHEDIIS LWDQSLKPCV |
| 121 | KLTPLCVSLK CTDLKNDTNT NSSSGRMIME KGEIKNCSFN ISTSIRGKVQ KEYAFFYKLD |
| 181 | IIPIDNDTTS YTLTSCNTSV ITQACPKVSF EPIPIHYCAP AGFAILKCNN KTFNGTGPCT |
| 241 | NVSTVQCTHG IRPVVSTQLL LNGSLAEEEV VIRSVNFTDN AKTIIVQLNT SVEINCTRPN |
| 301 | NNTRKKIRIQ RGPGRAFVTI GKIGNMRQAH CNISRAKWNA TLKQIASKLR EQFGNNKTII |
| 361 | FKQSSGGDPE IVTHSFNCGG EFFYCNSTQL FNSTWFNSTW STEGSNNTEG SDTITLPCRI |
| 421 | KQFINMWQEV GKAMYAPPIS GQIRCSSNIT GLLLTRDGGN NNNGSEIFRP GGGDMRDNWR |
| 481 | SELYKYKVVK IEPLGVAPT [symbol] [symbol] KRR [symbol] V [symbol] R [symbol] G [symbol] GFLGAAGSTM GAASMTLTVQ |
| 541 | ARQLLSGIVQ QQNNLLRAIE AQQHLLQLTV WGIKQLQARI LAVERYLKDQ QLLGIWGCSG |
| 601 | KLICTTAVPW NASW [symbol] NKS [symbol] E QIWN [symbol] TTWME WDREINNYTS LIHSLIEESQ NQQEKNEQEL |
| 661 | LELDKWASLW NWFNIT [symbol] WLW YIKLFIMIVG GLVGLRIVFA VLSVVNRVRQ GYSPLSFQTH |
| 721 | LPIPRGPDRP EGIEEEGGER DRDRSIRLVN GSLALIWDDL RSLCLFSYHR LRDLLLIVTR |
| 781 | IVELLGRRGW EALKYWWNLL QYWSQELKNS AVSLLNATAI AVAEGTDRVI EVVQGACRAI |
| 841 | RHIPRRIRQG LERILL |

[0048] In some embodiments, a binding agent of this disclosure may comprise these binding specificities along with the neutralization characteristics described above (i.e., neutralization of HIV-1 pseudoviruses TRO.11 (Clade B), 25710 (Clade C), CE1176, BJOX (CRF07_BC), CH119 (CRF07_BC), 246-F3 (Clade AC), X1632 (Clade G), CNE55 (CRF01_AE), CD0217(Clade C) at a concentration is from 10⁻² to 10° μg/ml (i.e., 10 ng/ml to 1 μg/ml), or between 10⁰-10¹ μg/ml (i.e., 1-10 μg/ml), to at least about 50% (FIGS. 3, 4, 9; Tables 7A, 7B, and 8A through 8M), as well as the neutralization of a majority of HIV-1 pseudoviruses at an IC₅₀ or IC₈₀ of less than 25 μg/ml.

[0049] The specificity of a binding agent may also be tested for binding to soluble trimers representing HIV proteins (e.g., soluble, cleaved SOSIP.664 gp140 trimers based on the subtype A transmitted/founder strain, BG505 as used in the examples herein). Preferred trimers (such as those used in the examples herein) are those being highly stable, homogenous and closely resembling native virus spikes when visualized by negative stain electron microscopy (EM) (Sanders, R. W. et al. A next-generation cleaved, soluble HIV-1 Env trimer, BG505 SOSIP.664 gp140, expresses multiple epitopes for broadly neutralizing but not non-neutralizing antibodies. PLoS Pathog. 9, e1003618 (2013)). Typically, broadly neutralizing antibodies against multiple neutralizing epitopes on HIV-1 Env will be highly reactive with such trimers. Conversely, non-neutralizing antibodies (NAbs) to the CD4-binding site, CD4-induced epitopes or gp41 ectodomain would not (and did not in the example) react with the trimers, even when their epitopes were present on simpler forms of Env (e.g., gp120 monomers or dissociated gp41 subunits). The examples also included a test, which may be used in testing any of binding agents described herein, in which the MPER was also deleted to improve trimer solubility and reduce aggregate formation. The binding agents may also be tested for binding to such trimers in the presence or absence of soluble CD4 (sCD4). The examples herein describe the testing of the LN02 and PGT151 (binding to a site at the interface between gp120 and gp41 (Dingens et al. Cell Host Microbe. 2017 Jun. 14; 21(6):777-787.e4. doi: 10.1016/j.chom.2017.05.003. Epub 2017 Jun. 1)) antibodies for binding to the 426c WT SOSIP Env protein complex, measured by surface plasmon resonance (SPR)). As shown in the examples, the biotinylated IgG1 LN02 antibody was shown to bind the 426c WT SOSIP Env protein but was completely blocked from binding the Env protein that had been pre-incubated with an unlabeled LN02 antibody. In a similar experiment, the biotinylated interface binding bNab PGT151 bound tightly to 426c WT SOSIP Env protein but PGT151 bound more weakly to the LN02+426c WT SOSIP Env protein complex. The results presented in the examples therefore indicate that IgG1 LN02 antibody might recognize an epitope at the gp120/gp41 interface of HIV-1 Env. Given that PGT151 binding to 426c WT SOSIP was not completely blocked by LN02, it is possible that LN02 binds in the same region but not identical epitope compared to PGT151. Other assay systems including surface plasmon resonance may be used to test the binding agents contemplated herein. And similar tests may also be performed on any of the binding agents contemplated herein.

[0050] The term “binding affinity” and/or K_{D} refers to the dissociation rate of a particular antibody-antigen interaction. The K_{D} is the ratio of the rate of dissociation (“off-rate (k_{d})”) to the association rate (“on-rate (kₐ)). K_{D} therefore equals k_{d}/kₐ and is expressed as a molar concentration (M). Thus, the smaller the K_{D}, the stronger the affinity of binding. For example, a K_{D} of 1 mM indicates weak binding as compared to a K_{D} of 1 nM. K_{D} values for antibodies can be determined using methods well established in the art such as by using a Biacore® system. In some embodiments, the binding agents described herein may be compared with another binding agent with reference to the respective K_{D} values of each. These properties may be combined with other characteristics such as neutralization capacity and/or epitope specificity in order to compare binding agents to one another. Accordingly, binding agents having a similar K_{D} to those described herein, perhaps also sharing the neutralization capacity and epitope specificity described herein (e.g., as exhibited by LN02M), are also contemplated as part of this disclosure.

[0051] Any of the amino acid sequences of LN02M variable region and/or CDR and/or non-CDR amino acid sequences (and/or any one or more fragments and/or derivatives thereof) may be also substituted by any other amino acid as desired by one of ordinary skill in the art. For example, one of skill in the art may make conservative substitutions by replacing particular amino acids with others as shown in Table 5 below. The specific amino acid substitution selected may depend on the location of the site selected. An amino acid substitution may be said to “correspond to” where one of ordinary skill in the art could ascertain a significant amount of similarity between the amino acid sequences surrounding the amino acid being substituted. For instance, a particular amino acid sequence may correspond to another where two, three, four or more N-terminal and C-terminal amino acids surrounding the amino acid being substituted are the same or similar (e.g., as described in Table 5) in the polypeptides being compared. Conservative amino acid substitutions may involve a substitution of a native amino acid residue with a non-native residue such that there is little or no effect on the size, polarity, charge, hydrophobicity, or hydrophilicity of the amino acid residue at that position and, in particular, does not result in, e.g., decreased HIV neutralization capacity and/or different epitope specificity.

TABLE 5

| | | Preferred |
|---|---|---|
| Original | | Conservative |
| Amino | | Substitution of the |
| Acid | Exemplary Conservative Substitutions | Original Amino |
| Residue | of the Original Amino Acid Residue | Acid Residue |
| Ala | Val, Leu, Ile | Val |
| Arg | Lys, Gln, Asn | Lys |
| Asn | Gln | Gln |
| Asp | Glu | Glu |
| Cys | Ser, Ala | Ser |
| Gln | Asn | Asn |
| Glu | Asp | Asp |
| Gly | Pro, Ala | Ala |
| His | Asn, Gln, Lys, Arg | Arg |
| Ile | Leu, Val, Met, Ala, Phe, Norleucine | Leu |
| Leu | Norleucine, Ile, Val, Met, Ala, Phe | Ile |
| Lys | Arg, 1,4 Diamino-butyric Acid, Gln, Asn | Arg |
| Met | Leu, Phe, Ile | Leu |
| Phe | Leu, Val, Ile, Ala, Tyr | Leu |
| Pro | Ala | Gly |
| Ser | Thr, Ala, Cys | Thr |
| Thr | Ser | Ser |
| Trp | Tyr, Phe | Tyr |
| Tyr | Trp, Phe, Thr, Ser | Phe |
| Val | Ile, Met, Leu, Phe, Ala, Norleucine | Leu |

[0052] In certain embodiments, a nucleic acid molecule encoding one or more binding agents described herein may be inserted into one or more expression vectors, as discussed below in greater detail. In such embodiments, the binding agent may be encoded by nucleotides corresponding to the amino acid sequence. The particular combinations of nucleotides (codons) that encode the various amino acids (AA) are well known in the art, as described in various references used by those skilled in the art (e.g., Lewin, B. Genes V, Oxford University Press, 1994). The nucleotide sequences encoding the amino acids of said binding agents may be ascertained with reference to Table 6, for example. Nucleic acid variants may use any combination of nucleotides that encode the binding agent.

TABLE 6
Codons Encoding Amino Acids (AA)

| AA | Codon |
|---|---|
| Phe (F) | TTT |
| | TTC |
| Leu (L) | TTA |
| | TTG |
| | CTT |
| | CTC |
| | CTA |
| | CTG |
| Ile (I) | ATT |
| | ATC |
| | ATA |
| Met (M) | ATG |
| Val (V) | GTT |
| | GTC |
| | GTA |
| | GTG |
| Ser (S) | TCT |
| | TCC |
| | TCA |
| | TCG |
| Pro (P) | CCT |
| | CCC |
| | CCA |
| | CCG |
| Thr (T) | ACT |
| | ACC |
| | ACA |
| | ACG |
| Ala (A) | GCT |
| | GCC |
| | GCA |
| | GCG |
| Tyr (Y) | TAT |
| | TAC |
| TERM | TAA |
| | TAG |
| His (H) | CAT |
| | CAC |
| Gln (Q) | CAA |
| | CAG |
| Asn (N) | AAT |
| | AAC |
| Lys (K) | AAA |
| | AAG |
| Asp (D) | GAT |
| | GAC |
| Glu (E) | GAA |
| | GAG |
| Cys (C) | TGT |
| | TGC |
| TERM | TGA |
| Trp (W) | TGG |
| Arg (R) | CGT |
| | CGC |
| | CGA |
| | CGG |
| Ser (S) | AGT |
| | AGC |
| Arg (R) | AGA |
| | AGG |
| Gly (G) | GGT |
| | GGC |
| | GGA |
| | GGG |

Those of ordinary skill in the art understand that the nucleotide sequence encoding a particular amino acid sequence may be easily derived from the amino acid sequence of any of LN02M variable region and/or CDR and/or non-CDR amino acid sequences and the information presented in Table 6. For instance, it may be deduced from the amino acid sequence YGSISRHFWG (SEQ ID NO.: 1) and the information presented in Table 6 that the amino acid sequence may be encoded by the nucleotide sequence TATGGCAGCATTAGCCGCCATTTTTGGGGC (SEQ ID NO.: 34). Those of ordinary skill in the art would understand that nucleotide sequences encoding LN02M variable region and/or CDR and/or non-CDR amino acid sequences may be deduced in the same way, and such nucleotide sequences are contemplated herein. Expression vectors comprising such nucleic acid sequences are also contemplated by this disclosure. Where the binding agents are antibodies, nucleotide sequences encoding the variable regions thereof may also be isolated from the phage and/or hybridoma cells expressing the same cloned into expression vectors. Methods for producing such preparations are well-known in the art.

[0053] Nucleic acid molecules encoding one or more HIV binding agents may be contained within a viral and/or a non-viral vector. In one embodiment, a DNA vector is utilized to deliver nucleic acids encoding one or more HIV binding agents to the patient. In doing so, various strategies may be utilized to improve the efficiency of such mechanisms including, for example, the use of self-replicating viral replicons (Caley, et al. 1999. Vaccine, 17: 3124-2135; Dubensky, et al. 2000. Mol. Med. 6: 723-732; Leitner, et al. 2000. Cancer Res. 60: 51-55), codon optimization (Liu, et al. 2000. Mol. Ther., 1: 497-500; Dubensky, supra; Huang, et al. 2001. J. Virol. 75: 4947-4951), in vivo electroporation (Widera, et al. 2000. J. Immunol. 164: 4635-3640), incorporation of nucleic acids encoding co-stimulatory molecules, cytokines and/or chemokines (Xiang, et al. 1995. Immunity, 2: 129-135; Kim, et al. 1998. Eur. J. Immunol., 28: 1089-1103; Iwasaki, et al. 1997. J. Immunol. 158: 4591-3301; Sheerlinck, et al. 2001. Vaccine, 19: 2647-2656), incorporation of stimulatory motifs such as CpG (Gurunathan, supra; Leitner, supra), sequences for targeting of the endocytic or ubiquitin-processing pathways (Thomson, et al. 1998. J. Virol. 72: 2246-2252; Velders, et al. 2001. J. Immunol. 166: 5366-5373), prime-boost regimens (Gurunathan, supra; Sullivan, et al. 2000. Nature, 408: 605-609; Hanke, et al. 1998. Vaccine, 16: 439-445; Amara, et al. 2001. Science, 292: 69-74), proteasome-sensitive cleavage sites, and the use of mucosal delivery vectors such as Salmonella (Darji, et al. 1997. Cell, 91: 765-775; Woo, et al. 2001. Vaccine, 19: 2945-2954). Other methods are known in the art, some of which are described below. Various viral vectors that have been successfully utilized for introducing a nucleic acid to a host include retrovirus, adenovirus, adeno-associated virus (AAV), herpes virus, and poxvirus, among others. The vectors may be constructed using standard recombinant techniques widely available to one skilled in the art. Such techniques may be found in common molecular biology references such as Molecular Cloning: A Laboratory Manual (Sambrook, et al., 1989, Cold Spring Harbor Laboratory Press), Gene Expression Technology (Methods in Enzymology, Vol. 185, edited by D. Goeddel, 1991. Academic Press, San Diego, Calif.), and PCR Protocols: A Guide to Methods and Applications (Innis, et al. 1990. Academic Press, San Diego, ca). “Non-viral” plasmid vectors may also be suitable in certain embodiments. Preferred plasmid vectors are compatible with bacterial, insect, and/or mammalian host cells. Such vectors include, for example, PCR-ii, PCR3, and pcDNA3.1 (Invitrogen, San Diego, Calif.), pBSii (Stratagene, La Jolla, Calif.), pet15 (Novagen, Madison, Wis.), pGEX (Pharmacia Biotech, Piscataway, N.J.), pEGFp-n2 (Clontech, Palo Alto, Calif.), pETI (Bluebacii, Invitrogen), pDSR-alpha (PCT pub. No. WO 90/14363) and pFASTBACdual (Gibco-BRL, Grand island, NY) as well as Bluescript® plasmid derivatives (a high copy number COLe1-based phagemid, Stratagene Cloning Systems, La Jolla, Calif.), PCR cloning plasmids designed for cloning TAQ-amplified PCR products (e.g., TOPO™ TA cloning® kit, PCR2.1® plasmid derivatives, Invitrogen, Carlsbad, Calif.). Bacterial vectors may also be used. These vectors include, for example, Shigella, Salmonella, Vibrio cholerae, Lactobacillus, Bacille Calmette Guérin (BCG), and Streptococcus (see for example, WO 88/6626; WO 90/0594; WO 91/13157; WO 92/1796; and WO 92/21376). Many other non-viral plasmid expression vectors and systems are known in the art and may be use. Other delivery techniques may also suffice including, for example, DNA-ligand complexes, adenovirus-ligand-DNA complexes, direct injection of DNA, CaPO₄ precipitation, gene gun techniques, electroporation, and colloidal dispersion systems. Colloidal dispersion systems include macromolecule complexes, nanocapsules, microspheres, beads, and lipid-based systems including oil-in-water emulsions, micelles, mixed micelles, and liposomes. The preferred colloidal system is a liposome, which are artificial membrane vesicles useful as delivery vehicles in vitro and in vivo. RNA, DNA and intact virions can be encapsulated within the aqueous interior and be delivered to cells in a biologically active form (Fraley, R., et al., 1981, Trends Biochem. Sci., 6: 77). The composition of the liposome is usually a combination of phospholipids, particularly high-phase-transition-temperature phospholipids, usually in combination with steroids, especially cholesterol. Other phospholipids or other lipids may also be used. The physical characteristics of liposomes depend on pH, ionic strength, and the presence of divalent cations. Examples of lipids useful in liposome production include phosphatidyl compounds, such as phosphatidylglycerol, phosphatidylcholine, phosphatidylserine, phosphatidylethanolamine, sphingolipids, cerebrosides, and gangliosides. Particularly useful are diacylphosphatidylglycerols, where the lipid moiety contains from 14-18 carbon atoms, particularly from 16-18 carbon atoms, and is saturated. Illustrative phospholipids include egg phosphatidylcholine, dipalmitoylphosphatidylcholine and distearoylphosphatidylcholine.

[0054] A cultured cell comprising the vector is also provided. The cultured cell may be a cultured cell transfected with the vector or a progeny of the cell, wherein the cell expresses the immunogenic polypeptide. Suitable cell lines are known to those of skill in the art and are commercially available, for example, through the American Type Culture Collection (ATCC). The transfected cells can be used in a method of producing an immunogenic polypeptide. The method comprises culturing a cell comprising the vector under conditions that allow expression of the immunogenic polypeptide, optionally under the control of an expression sequence. The immunogenic polypeptide can be isolated from the cell or the culture medium using standard protein purification methods. In some embodiments, the binding agents described herein may be conjugated to active agents to target and inhibit the function of and/or eliminate cell populations expressing HIV polypeptides and/or harboring HIV (and/or another antigen in the case of binding agents with multiple specificities). For instance, CD4⁺ T-cell populations containing replication competent HIV may be targeted and eliminated using binding agent/drug conjugates (e.g., antibody-drug conjugates (ADC)). Mono- and/or bi-specific candidate binding agents may be conjugated with one or more types of drugs (e.g., drugs damaging DNA, targeting microtubules). The binding agents described herein and/or derivatives thereof may also be adjoined to and/or conjugated to functional agents for in vitro and/or in vivo use. For instance, the binding agent may be adjoined to and/or conjugated to functional moieties such as cytotoxic drugs or toxins, and/or active fragments thereof such as diphtheria A chain, exotoxin A chain, ricin A chain, abrin A chain, curcin, crotin, phenomycin, enomycin, among others. Suitable functional moieties may also include radiochemicals. Binding agents, such as antibodies, may be adjoined to and/or conjugated to the one or more functional agents using standard techniques in the art.

[0055] In some embodiments, this disclosure provides binding agents with multiple specificities such that epitopes bound by LN02M binding agent and at least one other secondary antigen (e.g., a cell surface protein) may be bound by a single binding agent. In some embodiments, the secondary antigen may be one expressed by cells infected by an infectious agent. For instance, an exemplary secondary antigen may be HIV Env antigen other than gp41. Such binding agents may bind the secondary antigen and/or may serve to neutralize the infectious agent as may be determined using the assays described herein. Combinations of binding agents, such as one or more described herein with another available to those of ordinary skill in the art, are also contemplated herein. For instance, in some embodiments, the combinations may be identified to provide statistically significant differences from results (e.g., neutralization assays) obtained using only one or more of the binding agents and not others. In some embodiments, combinations exhibit additive and/or, preferably synergistic, neutralization of HIV, for example. In some embodiments, the combination may comprise a first binding agent having the characteristics of an LN02M binding agent (i.e., comprising a LN02M variable region and/or CDR and/or non-CDR amino acid sequences), and/or derivatives thereof, and any one or more of the antibodies described in any one or more of U.S. Pat. Nos. 5,087,557; 5,298,419; 5,459,060; 5,693,752; 5,731,189; 5,753,503; 5,756,674; 5,777,074; 5,804,440; 5,831,034; 6,008,044; 7,774,88762; U.S. Pat. Publications 2003/0118985A1, 2007/0292390A1, or 2014/0205612A1; WO 2002/032452A1 (e.g., binding the gp41 epitopes ELDKWA, ELEKWA, ELNKWA, ELDEWA); EP0335134B1 US 176077 (e.g, a humanized version of the mouse mAbs described therein); DE3932461A1 (mAb against the epitope Arg-Ile-Leu-Ala-Val-Glu-Arg-Leu-Lys-Try-Asp-Gln-Gln-Leu-Leu-Gly-Ile-Trp-Gly-Cys-Ser); Evans, et al. J. Immunol. 140(3): 941-3 (1988); Gorney, et al. Proc. Natl. Acad. Sci. USA, 86: 1624-28 (1989); Teeuwsen, et al. (1990) AIDS Res. Hum. Retroviruses 6, 381-392; Earl, et al. J. Virol. 71(4): 2674-2684 (1997); Jiang, et al. J. Virol. 72(12): 10213-17 (1998); Zwick, et al. J. Virol. 75(22): 10892-10905 (2001); Eckert et al. PNAS USA, 98(20): 11187-11192 (2001); Louis, et al. J. Biol. Chem. 278(22): 20278-20285 (2003); and/or Pietzsch, et al. J. Virol. 84(10): 5032-42 (2010); all of which are incorporated herein in their entirety. For instance, any of the binding agents described herein may be combined with (i.e., as a single composition, and/or used in conjunction with) one or more the antibodies commonly known as 2F5, 4E10 and/or Z13e1, and/or derivatives thereof, among others. The binding agents of such compositions may be different entities such as two or more different monoclonal antibodies or derivatives thereof, or may be found on the same entity such as a bi-functional antibody (a single antibody or derivative thereof comprising multiple binding specificities). Such combinations as described herein may also be combined with one or more other agents that may affect immune cell function such as antibodies against CTLA-4, and the like. One of ordinary skill in the art would recognize that many such combinations may be suitable for use as described herein.

[0056] As mentioned above, the HIV binding agents described herein may be used to treat and/or prevent and/or ameliorate the symptoms of infection by HIV. As is well-known in the art, HIV isolates are now classified into discrete genetic subtypes. HIV-1 is known to comprise at least ten subtypes (A1, A2, A3, A4, B, C, D, E, F1, F2, G, H, J and K) (Taylor et al, NEJM, 359(18):1965-1966 (2008)). HIV-2 is known to include at least five subtypes (A, B, C, D, and E). Subtype B has been associated with the HIV epidemic in homosexual men and intravenous drug users worldwide. Most HIV-1 immunogens, laboratory adapted isolates, reagents and mapped epitopes belong to subtype B. In sub-Saharan Africa, India and China, areas where the incidence of new HIV infections is high, HIV-1 subtype B accounts for only a small minority of infections, and subtype HIV-1 C appears to be the most common infecting subtype. Any of these types of isolates may be addressed using the binding agents described herein. One or more binding agents may also be administered with or in conjunction with one or more agents used to prevent, treat and/or ameliorate HIV such as for example, a protease inhibitor, an HIV entry inhibitor, a reverse transcriptase inhibitor, and/or an anti-retroviral nucleoside analog. Suitable compounds include, for example, Agenerase (amprenavir), Combivir (Retrovir/Epivir), Crixivan (indinavir), Emtriva (emtricitabine), Epivir (3tc/lamivudine), Epzicom, Fortovase/Invirase (saquinavir), Fuzeon (enfuvirtide), Hivid (ddc/zalcitabine), Kaletra (lopinavir), Lexiva (Fosamprenavir), Norvir (ritonavir), Rescriptor (delavirdine), Retrovir/AZT (zidovudine), Reyatax (atazanavir, BMS-232632), Sustiva (efavirenz), Trizivir (abacavir/zidovudine/lamivudine), Truvada (Emtricitabine/Tenofovir DF), Videx (ddl/didanosine), Videx EC (ddl, didanosine), Viracept (nevirapine), Viread (tenofovir disoproxil fumarate), Zerit (d4T/stavudine), and Ziagen (abacavir) may be utilized. Other suitable agents are known to those of skill in the art and may be suitable for use as described herein. Such agents may either be used prior to, during, or after administration of the binding agents and/or use of the methods described herein.

[0057] The skilled artisan has many suitable techniques for using the binding agents (e.g., antibodies) described herein to identify biological samples containing proteins that bind thereto. For instance, antibodies may be utilized to isolate HIV or cells containing HIV and/or expressing HIV antigens using, for example, immunoprecipitation or other capture-type assay. This well-known technique is performed by attaching the antibody to a solid support or chromatographic material (e.g., a bead coated with Protein A, Protein G and/or Protein L). The bound antibody is then introduced into a solution either containing or believed to contain HIV antigens (e.g., an HIV-infected cell). The HIV antigen(s) may then bind to the antibody and non-binding materials are washed away under conditions in which the HIV antigen(s) remains bound to the antibody. The bound protein may then be separated from the antibody and analyzed as desired. Similar methods for isolating a protein using an antibody are well-known in the art. The binding agents (e.g., antibodies) may also be utilized to detect HIV or HIV antigens within a biological sample. For instance, the antibodies may be used in assays such as, for example, flow cytometric analysis, ELISA, immunoblotting (e.g., western blot), in situ detection, immunocytochemistry, and/or immunohistochemistry. Methods of carrying out such assays are well-known in the art. In some embodiments, the binding agents may be adjoined to and/or conjugated to one or more detectable labels. For instance, suitable detectable labels may include, for instance, fluorosceins (e.g., DyLight, Cy3, Cy5, FITC, HiLyte Fluor 555, HiLyte Fluor 647; 5-carboxy-2,7-d ichlorofluorescein; 5-Carboxyfluorescein (5-FAM); 5-HAT (Hydroxy Tryptamine); 5-Hydroxy Tryptamine (HAT); 6-JOE; 6-carboxyfluorescein (6-FAM); FITC; 6-carboxy-1,4-dichloro-2′,7′-dichlorofluorescein (TET); 6-carboxy-1,4-dichloro-2′,4′, 5′, 7′-tetra-chlorofluorescein (HEX); 6-carboxy-4′,5′-dichloro-2′, 7′-dimethoxyfluorescein (JOE); Alexa fluors (e.g., 350, 405, 430, 488, 500, 514, 532, 546, 555, 568, 594, 610, 633, 635, 647, 660, 680, 700, 750); BODIPY fluorophores (e.g., 492/515, 493/503, 500/510, 505/515, 530/550, 542/563, 558/568, 564/570, 576/589, 581/591, 630/650-X, 650/665-X, 665/676, FL, FL ATP, FI-Ceramide, R6G SE, TMR, TMR-X conjugate, TMR-X, SE, TR, TR ATP, TR-X SE)), rhodamines (e.g., 110, 123, B, B 200, BB, BG, B extra, 5-carboxytetramethylrhodamine (5-TAMRA), 5 GLD, 6-Carboxyrhodamine 6G, Lissamine, Lissamine Rhodamine B, Phallicidine, Phalloidine, Red, Rhod-2, ROX (6-carboxy-X-rhodamine), 5-ROX (carboxy-X-rhodamine), Sulphorhodamine B can C, Sulphorhodamine G Extra, TAMRA (6-carboxytetramethylrhodamine), Tetramethylrhodamine (TRITC), WT), Texas Red, and/or Texas Red-X. Other detectable labels known in the art may also be suitable for use. Binding agents, such as antibodies, may be adjoined to and/or conjugated to the one or more detectable labels using standard techniques in the art.

[0058] The binding agents described herein may be also be used to determine the presence of a disease state in a patient, to predict prognosis, or to determine the effectiveness of a chemotherapeutic or other treatment regimen. Expression profile assays, performed as described herein or as is otherwise known in the art, may be used to determine the relative level of expression of HIV in a cell, for instance. The level of expression may then be correlated with base (e.g., control) levels to determine whether a particular disease is present within the patient, the patient's prognosis, or whether a particular treatment regimen is effective. For example, if the patient is being treated with a particular anti-infective regimen, an increased or decreased level of expression of HIV in the patient's tissues (e.g., in plasma) may indicate the regimen is worsening or improving the load of HIV in that host. The increase or decrease in expression may indicate the regimen is having or not having the desired effect and another therapeutic modality may therefore be selected.

[0059] It is also possible to use the binding agents described herein as reagents in drug screening assays to test, for example, new drug candidates. The reagents may be used to ascertain the effect of a drug candidate on the expression of the immunogenic target in a cell line, or a cell or tissue of a patient. The expression profiling technique may be combined with high throughput screening techniques to allow rapid identification of useful compounds and monitor the effectiveness of treatment with a drug candidate (see, for example, Zlokarnik, et al., Science 279, 84-8 (1998)). Drug candidates may be chemical compounds, nucleic acids, proteins, antibodies, or derivatives therefrom, whether naturally occurring or synthetically derived. Drug candidates thus identified may be utilized, among other uses, as pharmaceutical compositions for administration to patients or for use in further screening assays.

[0060] In some embodiments, the binding agents are in purified form. A “purified” binding agent (e.g., antibody) may be one that is separated from at least about 50% of the proteins and/or other components with which it is initially found (e.g., as part of a hybridoma supernatant or ascites preparation in the case of a monoclonal antibody). A purified binding agent (e.g., antibody) may be one that is separated from at least about 50%, 60%, 75%, 90%, or 95% of the proteins and/or other components with which it is initially found.

[0061] The binding agents (e.g., polypeptides, antibodies) and nucleic acids described herein may also be combined with one or more pharmaceutically acceptable carriers prior to administration to a host. A pharmaceutically acceptable carrier is a material that is not biologically or otherwise undesirable, e.g., the material may be administered to a subject, without causing any undesirable biological effects or interacting in a deleterious manner with any of the other components of the pharmaceutical composition in which it is contained. The carrier would naturally be selected to minimize any degradation of the active ingredient and to minimize any adverse side effects in the subject, as would be well known to one of skill in the art. Suitable pharmaceutical carriers and their formulations are described in, for example, Remington's: The Science and Practice of Pharmacy, 21St Edition, David B. Troy, ed., Lippicott Williams & Wilkins (2005). Typically, an appropriate amount of a pharmaceutically-acceptable salt is used in the formulation to render the formulation isotonic. Examples of the pharmaceutically-acceptable carriers include, but are not limited to, sterile water, saline, buffered solutions like Ringer's solution, and dextrose solution. The pH of the solution is generally from about 5 to about 8 or from about 7 to about 7.5. Other carriers include sustained-release preparations such as semipermeable matrices of solid hydrophobic polymers containing polypeptides or fragments thereof. Matrices may be in the form of shaped articles, e.g., films, liposomes or microparticles. It will be apparent to those persons skilled in the art that certain carriers may be more preferable depending upon, for instance, the route of administration and concentration of composition being administered. Carriers are those suitable for administration of polypeptides and/or fragments thereof to humans or other subjects. Pharmaceutical compositions may also include carriers, thickeners, diluents, buffers, preservatives, surface active agents, adjuvants, immunostimulants, in addition to the immunogenic polypeptide. Pharmaceutical compositions may also include one or more active ingredients such as antimicrobial agents, anti-inflammatory agents and anesthetics. The pharmaceutical composition may be administered orally, parentally, by inhalation spray, rectally, intranodally, or topically in dosage unit formulations containing conventional pharmaceutically acceptable carriers, adjuvants, and vehicles. The term “pharmaceutically acceptable carrier” or “physiologically acceptable carrier” as used herein refers to one or more formulation materials suitable for accomplishing or enhancing the delivery of a nucleic acid, polypeptide, or peptide as a pharmaceutical composition. A “pharmaceutical composition” is a composition comprising a therapeutically effective amount of a nucleic acid or polypeptide. The terms “effective amount” and “therapeutically effective amount” each refer to the amount of a binding agent, nucleic acid or the like used to observe the desired therapeutic effect (e.g., eliminating HIV).

[0062] Methods for treating one or more disease conditions (e.g., HIV or cancer) in a mammalian host comprising administering to the mammal at least one or more effective doses of one or more binding agents (and/or derivative(s) thereof) described herein are also provided. In some embodiments, the binding agent is a monoclonal antibody or fragment or derivative thereof comprising one or more of LN02M variable region and/or CDR and/or non-CDR amino acid sequences (i.e., comprising LN02M variable region and/or CDR and/or non-CDR amino acid sequences). The one or more binding agents may be administered in a dosage amount of about 1 to about 50 mg/kg, about 1 to about 30 mg/kg, or about 5 to about 30 mg/kg (e.g., about any of 1, 2, 3, 4, 5, 6, 7, 8, 9, 10, 11, 12, 13, 14, 15, 16, 17, 18, 19, 20, 21, 22, 23, 24, 25, 26, 27, 28, 29, 30, 35, or 40 mg/kg). In certain embodiments, the one or more binding agents may be administered to the mammal (e.g., intradermally, intravenously, orally, rectally) at about 10 mg/kg one or more times. When multiple doses are administered, the doses may comprise about the same or different amount of binding agent in each dose. The doses may also be separated in time from one another by the same or different intervals. For instance, the doses may be separated by about any of 6, 12, 24, 36, 48, 60, 72, 84, or 96 hours, one week, two weeks, three weeks, one month, two months, three months, four months, five months, six months, seven months, eight months, nine months, 10 months, 11 months, 12 months, 1.5 years, 2 years, 3 years, 4 years, 5 years, or any time period before, after, and/or between any of these time periods. In some embodiments, the binding agents may be administered in conjunction with other agents (e.g., anti-infective agents and/or chemotherapeutic agent). Such other agents may be administered about simultaneously with the binding agents, or at a different time and/or frequency. Other embodiments of such methods may also be appropriate as could be readily determined by one of ordinary skill in the art.

[0063] To assist the skilled artisan in using the binding agents such as antibodies described herein, the same may be provided in kit format. A kit including one or more of such binding agents and optionally other components necessary for using the same to detect cells expressing HIV is also provided. The binding agents of the kit may be provided in any suitable form, including frozen, lyophilized, or in a pharmaceutically acceptable buffer such as TBS or PBS. The kit may also include other reagents required for utilization of the binding agents in vitro or in vivo such as buffers (e.g., TBS, PBS), blocking agents (solutions including nonfat dry milk, normal sera, Tween-20 Detergent, BSA, or casein), and/or detection reagents (e.g., goat anti-mouse IgG biotin, streptavidin-HRP conjugates, allophycocyanin, B-phycoerythrin, R-phycoerythrin, peroxidase, detectable labels, and other labels and/or staining kits (e.g., ABC Staining Kit, Pierce)). The kits may also include other reagents and/or instructions for using the antibodies in commonly utilized assays described above such as, for example, flow cytometric analysis, ELISA, immunoblotting (e.g., western blot), in situ detection, immunocytochemistry, and/or immunohistochemistry. In one embodiment, the kit provides a binding agent in purified form. In another embodiment, the binding agent may be provided in biotinylated form either alone or along with an avidin-conjugated detection reagent (e.g., antibody). In another embodiment, the kit includes a binding agents comprising one or more detectable labels that may be used to directly detect HIV. Buffers and the like required for using any of these systems are well-known in the art and/or may be prepared by the end-user or provided as a component of the kit. The kit may also include a solid support containing positive- and negative-control protein and/or tissue samples. For example, kits for performing spotting or western blot-type assays may include control cell or tissue lysates for use in SDS-PAGE or nylon or other membranes containing pre-fixed control samples with additional space for experimental samples. Kits for visualization of HIV in cells on slides may include pre-formatted slides containing control cell or tissue samples with additional space for experimental samples. Other embodiments of kits are also contemplated herein as would be understood by those of ordinary skill in the art.

[0064] Thus, this disclosure provides binding agents such as the LN02 antibody with specificity for HIV (e.g., and/or an antigen thereof). In some embodiments, the binding agent is a polypeptide comprising at least one amino acid sequence selected from the group consisting of one or more LN02M variable region and/or CDR and/or non-CDR amino acid sequences. In some embodiments, the binding agent is a polypeptide comprising one or more combinations of LN02M variable region and/or CDR and/or non-CDR amino acid sequences. In some embodiments, the binding agent is an antibody. In some embodiments, the binding agent is a polypeptide such as an antibody comprising heavy and/or light chain CDRs and/or additional amino acid sequence shown for any of the binding agents (e.g., antibodies or derivatives thereof) of FIG. 1; a variable region shown in FIGS. 6A through 6E; heavy chain mutants of FIGS. 7A through 7D; light chain mutants of FIGS. 8A through 8F; any one or more of SEQ ID NOS. 3-92, 95-233, 248-482, or 491-699; and/or a conservatively substituted variant thereof; and/or a non-conservatively substituted variant thereof as described herein.

[0065] In some embodiments, the binding agents have specificity for an epitope comprising amino acid residues in the proximity of the gp120/gp41 interface of HIV-1 Env (corresponding residues underlined in SEQ ID NO. 237). In some embodiments, a binding agent of this disclosure may comprise any one or more of these binding specificities along with the neutralization characteristics described above but not of a control virus at a concentration is from 10²−10° ug/ml, or between 10⁰-10¹ ug/ml, to at least about 50%, and/or the ability to the neutralize HIV-1 pseudoviruses at an IC₅₀ or IC₈₀ of less than 25.

[0066] In some embodiments, the binding agent is derived from or related to (e.g., by sequence or derivation) a human antibody, human IgG, human IgG1, human IgG2, human IgG2a, human IgG2b, human IgG3, human IgG4, human IgM, human IgA, human IgA1, human IgA2, human IgD, human IgE, canine antibody, canine IgGA, canine IgGB, canine IgGC, canine IgGD, chicken antibody, chicken IgA, chicken IgD, chicken IgE, chicken IgG, chicken IgM, chicken IgY, goat antibody, goat IgG, mouse antibody, mouse IgG, pig antibody, and/or rat antibody, and/or a derivative thereof. In some embodiments, the derivative may be selected from the group consisting of an F_{ab}, F_{ab2}, Fab′ single chain antibody, Fᵥ, single chain, mono-specific antibody, bispecific antibody, trimeric antibody, multi-specific antibody, multivalent antibody, chimeric antibody, canine-human chimeric antibody, canine-mouse chimeric antibody, antibody comprising a canine Fc, humanized antibody, human antibody, caninized antibody, CDR-grafted antibody, shark antibody, nanobody, and/or camelid antibody. In some embodiments, the binding agent comprises at least a least a first and second specificity, the first being against HIV gp41 and the second being against a different antigen (e.g., an antigen of an infectious agent such as HIV (e.g., env) and/or a tumor antigen). In some embodiments, the binding agent and/or derivative thereof may comprise a detectable label fixably attached thereto. In some embodiments, the binding agent of any one and/or derivative thereof comprises an effector moiety (e.g., a cytotoxic drug, toxin, diphtheria A chain, exotoxin A chain, ricin A chain, abrin A chain, curcin, crotin, phenomycin, enomycin, and radiochemical) fixably attached thereto. In some embodiments, polynucleotides encoding one or more binding agents are also provided (e.g., as an expression vector). Host cells comprising and/or expressing the polypeptide products of such polynucleotides are also provided. In some embodiments, compositions comprising at least one binding agent or derivative; at least one isolated polynucleotide; at least one expression vector; and/or, at least one host cell; or a combination thereof; and, a pharmaceutically acceptable carrier are also provided.

[0067] This disclosure also provides methods for detecting HIV on a cell, the method comprising contacting a test biological sample with a binding agent or derivative described herein and detecting the binding agent bound to the biological sample or components thereof. Such methods may be an in vivo method or an in vitro method. In some embodiments, the method may comprise comparing the amount of binding to the test biological sample or components thereof to the amount of binding to a control biological sample or components thereof, wherein increased binding to the test biological sample or components thereof relative to the control biological sample or components thereof indicates the presence of a cell expressing HIV polypeptides in the test biological sample (e.g., mammalian blood). In some embodiments, a kit for detecting the expression of HIV in or on a cell, the kit comprising a binding agent or derivative thereof and instructions for use. In some embodiments, the binding agent and/or derivative thereof is in lyophilized form. In some embodiments, this disclosure provides methods for treating, preventing and/or ameliorating an infectious disease, cancer and/or autoimmunity in a mammal comprising administering to the mammal at least one effective dose of a pharmaceutical composition comprising a binding agent or derivative thereof. In some embodiments, the infectious disease is human immunodeficiency virus (HIV). In some embodiments, multiple doses are administered to the animal. In some embodiments, the binding agent and/or derivative thereof may be administered in a dosage amount of about 1 to 50 mg/kg.

[0068] In some embodiments, this disclosure provides a binding agent(s) comprising a variable region shown in FIGS. 6A through 6E; amino acid sequence of any mutant of FIGS. 7A through 7D and/or FIGS. 8A through 8F, and any effective (e.g., HIV neutralization) combination thereof; any one or more of SEQ ID NOS. 3-92, 95-233, 248-482, or 491-699, and any effective (e.g., HIV neutralization) combination thereof; a combination of light and heavy chains shown in Table 9 (i.e., ML085, Mx152, MX067, MX129, MX130, ML126, Mx175, Mx176, and Mx181); a combination of light and heavy chains shown in Tables 10A through 10C, 11, 12A through 12D, 13A through 13D, or 14; as well as variants thereof. This disclosure provides a binding agent (e.g., a polypeptide such as an antibody), or combination thereof, the binding comprising: a) at least one CDR illustrated in FIG. 1 (i.e., the amino acid sequences corresponding to CDR1, CDR2, and/or CDR3 of the LN02 bNab Heavy Chain or LN02 bNab Light Chain shown therein, including one or more, or all, of the amino acid substitutions illustrated therein); b) an amino acid sequence selected from the group consisting of SEQ ID NOS. 3-92 or 491-699, preferably including one or more CDR thereof (the CDRs being underlined in the LN02_light chain amino acid sequence of SEQ ID NO. 1 in FIG. 6D); an amino acid sequence selected from the group consisting of SEQ ID NOS. 95-233 or 248-482, preferably including one or more CDR thereof (the CDRs being underlined in the LN02_HEAVY CHAIN amino acid sequence of SEQ ID NO. 93 in FIG. 6A); a variable heavy chain region comprising MH01 (SEQ ID NO. 95), MH16 (SEQ ID NO. 110), MH22 (SEQ ID NO. 116), MH26 (SEQ ID NO. 120), MH30 (SEQ ID NO. 124), MH32 (SEQ ID NO. 126), MH35 (SEQ ID NO. 129), MH36 (SEQ ID NO. 130), MH37 (SEQ ID NO. 131), MH43 (SEQ ID NO. 136), MH44 (SEQ ID NO. 137), MH48 (SEQ ID NO. 141), MH49 (SEQ ID NO. 142), MH50 (SEQ ID NO. 143), MH51 (SEQ ID NO. 144), MH53 (SEQ ID NO. 146), MH59 (SEQ ID NO. 151), MH61 (SEQ ID NO. 153), MH64 (SEQ ID NO. 156), MH68 (SEQ ID NO. 159), MH73 (SEQ ID NO. 163), MH84 (SEQ ID NO. 174), MH89 (SEQ ID NO. 177), MH91 (SEQ ID NO. 178), MH92 (SEQ ID NO. 179), MH106 (SEQ ID NO. 193), MH107 (SEQ ID NO. 194), MH108 (SEQ ID NO. 195), MH111 (SEQ ID NO. 198), MH112 (SEQ ID NO. 199), MH115 (SEQ ID NO. 202), MH119 (SEQ ID NO. 206), MH120 (SEQ ID NO. 207), MH124 (SEQ ID NO. 211), MH 131 (SEQ ID NO. 218), MH135 (SEQ ID NO. 222), MH136 (SEQ ID NO. 223), MH138 (SEQ ID NO. 225), and/or MH146 (SEQ ID NO. 232); a variable light chain region comprising ML01 (SEQ ID NO. 3), ML02 (SEQ ID NO. 4), ML05 (SEQ ID NO. 7), ML08 (SEQ ID NO. 10), ML10 (SEQ ID NO. 12), ML11 (SEQ ID NO. 13), ML12 (SEQ ID NO. 14), ML31 (SEQ ID NO. 31), ML32 (SEQ ID NO. 32), ML44 (SEQ ID NO. 42), ML49 (SEQ ID NO. 47), ML51 (SEQ ID NO. 48), ML52 (SEQ ID NO. 49), ML60 (SEQ ID NO. 56), ML71 (SEQ ID NO. 66), ML73 (SEQ ID NO. 68), ML74 (SEQ ID NO. 69), ML79 (SEQ ID NO. 74), ML84 (SEQ ID NO. 79), ML85 (SEQ ID NO. 80), ML92 (SEQ ID NO. 87), or ML94 (SEQ ID NO. 89); f) a combination CDRs, amino acid sequences, variable heavy chain regions, and/or variable light chain regions of a), b), c), d), or e) above; g) a combination of a LN02M variable light chain (“Light chain mutant”) and a LN02M variable heavy chain (“Heavy chain mutant”) described in Tables 4, 9, 10A through 10C, 11, 12A through 12D, 13A through 13D, or 14; h) a combination of a LN02M variable light chain comprising ML01 (SEQ ID NO. 3) with LN02M variable heavy chain comprising MH02 (SEQ ID NO. 96), MH04 (SEQ ID NO. 98), MH22 (SEQ ID NO. 116), MH23 (SEQ ID NO. 117), MH30 (SEQ ID NO. 124), MH31 (SEQ ID NO. 125), MH35 (SEQ ID NO. 129), MH36 (SEQ ID NO. 130), and/or MH37 (SEQ ID NO. 131); i) a combination of a LN02M variable light chain ML12 (SEQ ID NO. 14) with an LN02M variable heavy chain comprising MH02 (SEQ ID NO. 96), MH04 (SEQ ID NO. 98), MH22 (SEQ ID NO. 116), MH23 (SEQ ID NO. 117) MH30 (SEQ ID NO. 124), MH31 (SEQ ID NO. 125), MH35 (SEQ ID NO. 129), MH36 (SEQ ID NO. 130), and/or MH37 (SEQ ID NO. 131); j) a combination of a LN02M variable light chain ML23 (SEQ ID NO. 24) with LN02M variable heavy chain comprising MH31 (SEQ ID NO. 125), MH43 (SEQ ID NO. 136), MH48 (SEQ ID NO. 141), and MH51 (SEQ ID NO. 144); k) a combination of a LN02M variable light chain ML30 (SEQ ID NO. 30) with LN02M variable heavy chain comprising MH31 (SEQ ID NO. 125), MH43 (SEQ ID NO. 136), MH48 (SEQ ID NO. 141), or MH51 (SEQ ID NO. 144); I) a combination of a LN02M variable light chain ML31 (SEQ ID NO. 31) with LN02M variable heavy chain comprising MH02 (SEQ ID NO. 96), MH04 (SEQ ID NO. 98), MH22 (SEQ ID NO. 116), MH23 (SEQ ID NO. 117), MH30 (SEQ ID NO. 124), MH31 (SEQ ID NO. 125), MH35 (SEQ ID NO. 129), MH36 (SEQ ID NO. 130), MH37 (SEQ ID NO. 131), MH43 (SEQ ID NO. 136), MH48 (SEQ ID NO. 141), or MH51 (SEQ ID NO. 144); m) a combination of a LN02M variable light chain ML32 (SEQ ID NO. 32) with LN02M variable heavy chain MH31 (SEQ ID NO. 125); n) a combination of a LN02M variable light chain ML85 (SEQ ID NO. 80) with a LN02M variable heavy chain comprising MH31 (SEQ ID NO. 125), MH35 (SEQ ID NO. 129), MH43 (SEQ ID NO. 136), MH49 (SEQ ID NO. 142), MH60 (SEQ ID NO. 152), MH76 (SEQ ID NO. 166), MH111 (SEQ ID NO. 198), or MH112 (SEQ ID NO. 199); o) a combination of light and heavy chain substitutions shown in Table 9, optionally selected from the group consisting of the binding agents ML085 comprising the K93Y substitution on the light chain and wild-type LN02 heavy chain; Mx152 comprising the comprising the K93Y and E95Q substitutions to wild-type LN02 on the light chain and the S19H substitution to wild-type LN02 on the heavy chain; MX067 comprising the K93Y substitution to wild-type LN02 on the light chain and the S19H substitution to wild-type LN02 on the heavy chain; MX129 comprising the K93Y and T29S substitutions to wild-type LN02 on the light chain and the S19H substitution to wild-type LN02 on the heavy chain; MX130 comprising the K93Y and T29S substitutions to wild-type LN02 on the light chain and the T21Y substitution to wild-type LN02 heavy chain; ML126 comprising the K93Y and E95Q substitutions to wild-type LN02 on the light chain and the wild-type LN02 heavy chain; Mx175 comprising the K93Y and 197V substitutions to wild-type LN02 on the light chain and the S40A, Q42R, and T44G substitutions to wild-type LN02 on the heavy chain; Mx176 comprising the K93Y and 197V substitutions to wild-type LN02 on the light chain and the S40P, Q42R, G43K, and T44G substitutions to wild-type LN02 on the heavy chain; and, Mx181 comprising the K93Y and 197V substitutions to wild-type LN02 on the light chain and the S40P, Q42R, G43K, and T44G substitutions to wild-type LN02 on the heavy chain; and/or, p) a conservatively substituted variant of any of a) through o); and/or, q) a non-conservatively substituted variant comprising one or more amino acid substitutions outside of a CDR amino acid sequence of any of a) through p), or one to three substitutions within a CDR amino acid sequence of any of a) through p); a binding agent, preferably an antibody, including any of a) through p) above, exhibiting at least a 2-fold improvement in neutralization activity compared to LN02 and an equivalent or improved potency compared to ML085. In preferred embodiments, such a binding agent neutralizes human immunodeficiency virus (HIV) in an in vitro HIV neutralization assay and/or in vivo. In some embodiments, the binding agent exhibits neutralization of HIV-1 pseudoviruses BJOX (CRF07_BC), CE1176, TRO.11 (B), X1632 (G), CH119 (CRF07_BC), CNE55 (CRF01_AE), 25710 (C), CD0217(C) at a concentration is from 10²−10° ug/ml, or between 10⁰-10¹ μg/ml in an in vitro HIV neutralization assay. In some embodiments, the percent neutralization is at least about 50% or more. In some embodiments, the binding agent neutralizes a majority of the HIV-1 pseudoviruses tested at an IC₅₀ or IC₈₀ of less than 25 μg/ml. In some embodiments, the binding agent is an antibody, in preferred embodiments a monoclonal antibody, and even more preferred embodiments a human monoclonal antibody; or a derivative thereof. In some embodiments, the antibody isotype is IgG1 or IgG3. In some preferred embodiments, the binding agent comprises at least one heavy chain CDR amino acid sequence illustrated in FIG. 1 (i.e., corresponding to CDR1, CDR2, or CDR3 of LN02 bNab Heavy Chain chain underlined, and the substitutions thereto, shown therein) and/or described in any of SEQ ID NOS. 95-233; and/or a conservatively substituted variant thereof. In some preferred embodiments, the binding agent comprises at least one light chain CDR amino acid sequence in FIG. 1 (i.e., corresponding to CDR1, CDR2, or CDR3 of LN02 bNab Light chain underlined, and the substitutions thereto, shown therein) and/or described in any of SEQ ID NOS. 3-92; and/or a conservatively substituted variant thereof; and/or a non-conservatively substituted variant thereof as described above. In some preferred embodiments, the binding agent comprises at least one variable chain amino acid sequence selected from the group consisting of SEQ ID NOS. 3-92 and/or 95-233; and/or a conservatively substituted variant thereof; and/or a non-conservatively substituted variant thereof as described above. In some embodiments, the binding agent is derived from or based upon (e.g., includes the framework sequences of) a human antibody, human IgG, human IgG1, human IgG2, human IgG3, human IgG4, human IgM, human IgA, human IgA1, human IgA2, human IgD, human IgE, canine antibody, canine IgGA, canine IgGB, canine IgGC, canine IgGD, chicken antibody, chicken IgA, chicken IgD, chicken IgE, chicken IgG, chicken IgM, chicken IgY, goat antibody, goat IgG, mouse antibody, mouse IgG, pig antibody, rat antibody, or a camelid antibody. In some embodiments, this disclosure provides derivatives of such binding agents, such as one selected from the group consisting of an F_{ab}, F_{ab2}, Fab′ single chain antibody, Fᵥ, single chain, mono-specific antibody, bispecific antibody, trimeric antibody, multi-specific antibody, multivalent antibody, chimeric antibody, canine-human chimeric antibody, canine-mouse chimeric antibody, antibody comprising a canine Fc, humanized antibody, human antibody, caninized antibody, CDR-grafted antibody, shark antibody, nanobody, and camelid antibody. In some embodiments, the binding agent or derivative thereof comprises at least a least a first and second specificity, the first being against gp41 and the second being against a different antigen. In some embodiments, the binding agent or derivative thereof comprises one or more detectable labels fixably attached thereto (e.g., selected from the group consisting of fluorescein, DyLight, Cy3, Cy5, FITC, HiLyte Fluor 555, HiLyte Fluor 647, 5-carboxy-2,7-dichlorofluorescein, 5-carboxyfluorescein, 5-FAM, hydroxy tryptamine, 5-hydroxy tryptamine (5-HAT), 6-carboxyfluorescein (6-FAM), FITC, 6-carboxy-1,4-dichloro-2′,7′-dichlorofluorescein (TET), 6-carboxy-1,4-dichloro-2′,4′,5′,7′-tetrachlorofluorescein (HEX), 6-carboxy-4′,5′-dichloro-2′,7′-dimethoxyfluorescein (6-JOE), an Alexa fluor, Alexa fluor 350, Alexa fluor 405, Alexa fluor 430, Alexa fluor 488, Alexa fluor 500, Alexa fluor 514, Alexa fluor 532, Alexa fluor 546, Alexa fluor 555, Alexa fluor 568, Alexa fluor 594, Alexa fluor 610, Alexa fluor 633, Alexa fluor 635, Alexa fluor 647, Alexa fluor 660, Alexa fluor 680, Alexa fluor 700, Alexa fluor 750, a BODIPY fluorophores, BODIPY 492/515, BODIPY 493/503, BODIPY 500/510, BODIPY 505/515, BODIPY 530/550, BODIPY 542/563, BODIPY 558/568, BODIPY 564/570, BODIPY 576/589, BODIPY 581/591, BODIPY 630/650-X, BODIPY 650/665-X, BODIPY 665/676, FL, FL ATP, FI-Ceramide, R6G SE, TMR, TMR-X conjugate, TMR-X, SE, TR, TR ATP, TR-X SE, a rhodamine, rhodamine 110, rhodamine 123, rhodamine B, rhodamine B 200, rhodamine BB, rhodamine BG, rhodamine B extra, 5-carboxytetramethylrhodamine (5-TAMRA), 5 GLD, 6-carboxyrhodamine 6G, Lissamine, Lissamine Rhodamine B, Phallicidine, Phalloidine, rhodamine red, Rhod-2, 6-carboxy-X-rhodamine (ROX), carboxy-X-rhodamine (5-ROX), Sulphorhodamine B can C, Sulphorhodamine G Extra, 6-carboxytetramethylrhodamine (TAMRA), tetramethylrhodamine (TRITC), rhodamine WT, Texas Red, and Texas Red-X). In some embodiments, the binding agent or derivative thereof comprises one or more effector moieties fixably attached thereto (e.g., selected from the group consisting of a cytotoxic drug, toxin, diphtheria A chain, exotoxin A chain, ricin A chain, abrin A chain, curcin, crotin, phenomycin, enomycin, and radiochemical).

[0069] In some embodiments, this disclosure provides an isolated polynucleotide encoding any such binding agent(s), expression vectors comprising the same, and/or a host cell comprising the same. In some embodiments, this disclosure provides a composition comprising at least one such binding agent and/or or derivative thereof, at least one isolated polynucleotide encoding the same; at least one expression vector encoding the same, and/or, at least one host cell capable of producing the same (e.g., comprising at least one such polynucleotide and/or expression vector), and/or a combination thereof; and, a pharmaceutically acceptable carrier. In some embodiments, this disclosure also provides methods for manufacturing a binding agent and/or derivative thereof. In some embodiments, such methods for manufacturing comprising expressing one or more polynucleotides encoding a binding agent and/or derivative thereof of this disclosure in a host cell and purifying (e.g., to 90%, 95%, 99%, or 100% purity as may be determined by those of ordinary skill in the art using standard techniques) the same from the host cell, cell culture supernatant thereof, or the like, using standard techniques.

[0070] In some embodiments, this disclosure provides methods for detecting HIV on a cell, the method comprising contacting a test biological sample with a binding agent or derivative of this disclosure, and detecting the binding agent bound to the biological sample or components thereof. In some embodiments, such methods comprise comparing the amount of binding to the test biological sample or components thereof to the amount of binding to a control biological sample or components thereof, wherein increased binding to the test biological sample or components thereof relative to the control biological sample or components thereof indicates the presence of a cell expressing HIV in the test biological sample. In some embodiments, the test biological sample comprises, is, or is derived from mammalian blood or a component thereof. In some embodiments, the method is an in vivo method or the method is an in vitro method. In some embodiments, this disclosure provides methods for treating, preventing and/or ameliorating HIV infection and/or AIDS in a mammal comprising administering to the mammal at least one effective dose of a pharmaceutical composition comprising a binding agent and/or derivative thereof of this disclosure. In some embodiments, multiple doses of such a pharmaceutical composition are administered to the animal. In some embodiments, the binding agent and/or derivative thereof can be administered in a dosage amount of about 1 to 50 mg/kg. In some embodiments, this disclosure provides kits for detecting the expression of HIV in or on a cell, the kit comprising a binding agent and/or derivative thereof of this disclosure and optionally instructions for use. In some such embodiments, the binding agent, antibody, or derivative can be in lyophilized form.

[0071] The terms “about”, “approximately”, and the like, when preceding a list of numerical values or range, refer to each individual value in the list or range independently as if each individual value in the list or range was immediately preceded by that term. The terms mean that the values to which the same refer are exactly, close to, or similar thereto.

[0072] As used herein, a subject or a host is meant to be an individual. The subject can include domesticated animals, such as cats and dogs, livestock (e.g., cattle, horses, pigs, sheep, and goats), laboratory animals (e.g., mice, rabbits, rats, guinea pigs) and birds. In one aspect, the subject is a mammal such as a primate or a human.

[0073] Optional or optionally means that the subsequently described event or circumstance can or cannot occur, and that the description includes instances where the event or circumstance occurs and instances where it does not. For example, the phrase optionally the composition can comprise a combination means that the composition may comprise a combination of different molecules or may not include a combination such that the description includes both the combination and the absence of the combination (i.e., individual members of the combination).

[0074] Ranges may be expressed herein as from about one particular value, and/or to about another particular value. When such a range is expressed, another aspect includes from the one particular value and/or to the other particular value. Similarly, when values are expressed as approximations, by use of the antecedent about or approximately, it will be understood that the particular value forms another aspect. It will be further understood that the endpoints of each of the ranges are significant both in relation to the other endpoint, and independently of the other endpoint. Ranges (e.g., 90-100%) are meant to include the range per se as well as each independent value within the range as if each value was individually listed.

[0075] The term “combined” or “in combination” or “in conjunction” may refer to a physical combination of agents that are administered together or the use of two or more agents in a regimen (e.g., administered separately, physically and/or in time) for treating, preventing and/or ameliorating a particular disease.

[0076] When the terms treat, prevent, and/or ameliorate or derivatives thereof are used herein in connection with a given treatment for a given condition (e.g., preventing cancer infection by HIV), it is meant to convey that the treated patient either does not develop a clinically observable level of the condition at all, or develops it more slowly and/or to a lesser degree than he/she would have absent the treatment. These terms are not limited solely to a situation in which the patient experiences no aspect of the condition whatsoever. For example, a treatment will be said to have prevented the condition if it is given during exposure of a patient to a stimulus that would have been expected to produce a given manifestation of the condition, and results in the patient's experiencing fewer and/or milder symptoms of the condition than otherwise expected. For instance, a treatment can “prevent” infection by resulting in the patient's displaying only mild overt symptoms of the infection; it does not imply that there must have been no penetration of any cell by the infecting microorganism.

[0077] Similarly, reduce, reducing, and reduction as used herein in connection with prevention, treatment and/or amelioration of a given condition by a particular treatment typically refers to a subject developing an infection more slowly or to a lesser degree as compared to a control or basal level of developing an infection in the absence of a treatment (e.g., administration of one or more HIV binding agents). A reduction in the risk of infection may result in the patient's displaying only mild overt symptoms of the infection or delayed symptoms of infection; it does not imply that there must have been no penetration of any cell by the infecting microorganism.

[0078] All references cited within this disclosure are hereby incorporated by reference in their entirety. Certain embodiments are further described in the following examples. These embodiments are provided as examples only and are not intended to limit the scope of the claims in any way.

### EXAMPLES

### Example 1

### Lymph Node Donors

[0079] Selection of HIV-1 lymph node donors for the isolation of broadly neutralizing antibodies. As described in more detail elsewhere, in order to isolate the broadly neutralizing LN02 antibodies capable to broadly neutralize multi-Glade HIV-1 isolates in 107 plasma samples from chronically infected patients naïve to antiretroviral therapy were screened for the presence of high titers of antibodies able to neutralize a panel of nine (9) HIV-1 pseudoviruses from the Global Panel of HIV-1 reference strains (DeCamp, A. et al. Global panel of HIV-1 Env reference strains for standardized assessments of vaccine-elicited neutralizing antibodies. J Virol 88, 2489-2507 (2014)). This analysis resulted in the identification of eight (8) patients (FIG. 1) as lymph node donors for the subsequent isolation and characterization of potent broadly neutralizing antibodies. In particular, donor SA090 was identified as having high virus neutralizing activity (and for the lack of background activity against the negative control MLV pseudovirus). Germinal center and Memory IgG B cells from donor SA090 were sorted separately according to IgG (i.e. IgA and IgM negative cells), CD19 and CD38 expression (germinal center B cells are CD38 positive, which is not present on memory B cells) and interrogated for the production of HIV-1 neutralizing antibodies. In particular, highly pure IgG memory B cells and IgG germinal cells were seeded in separate plates as single cell micro-cultures on human feeder cells in the presence of Epstein-Barr Virus (EBV) (which also stimulate polyclonally memory B cells) and a cocktail composed TLR9 agonist CpG-2006, IL-2 (1000 IU/ml), IL-6 (10 ng/ml), IL-21 (10 ng/ml), and anti-BCR goat antibodies (BCR triggering). Supernatants from day 14 cultures were then tested in a primary screening using a 384-well based HIV-1 pseudoviruses neutralization assay (using in parallel two strains, CE1176 and BJOX2000, representative of Glade C and CRF07). Neutralization assays were undertaken on TZM-bl cells. In a 384-well plate, HIV-1 pseudoviruses that resulted in an output of 50-100×10⁴ relative light units (RLU) were incubated with B cell culture supernatants for 1 h at 37% (5% CO2) before the addition of 3000 TZM-bl cells. These were incubated for a further 72 h, after which supernatant was removed and 15 μl Steadylite reagent (Perkin Elmer) was added. Luciferase activity was detected 5 min later by reading the plates on a Synergy microplate luminometer (BioTek). The supernatants derived from germinal center B cells found to produce antibodies that cross-neutralize one or more of the HIV strains. The supernatants from these two cultures were further harvested and tested for their ability to neutralize pseudoviruses. One of these produced an antibody designated “LN02” and was found to neutralize HIV.

[0080] The LN02 antibody was characterized by determining the amino acid and nucleotide sequences of its variable regions and the complementarity determining regions (CDRs) ascertained. Accordingly, the binding agent termed “LN02” is an IgG1-type fully human monoclonal antibody having the CDR, VH and VL sequences shown in FIGS. 5 and 6 (e.g., SEQ ID NOS. 1, 93, 234 and 235). The LN02 antibody was also determined to be derived from the IGHV4-4*02 and IGLV3-21*01 germline genes and highly somatically mutated in variable genes of both heavy chain (31.2%) and kappa light chain (31.6%) compared to germ line. Recombinant LN02 antibody was produced and tested against the Global Panel of nine (9) HIV-1 reference pseudoviruses on TZM-bl cells, and found to be capable of neutralizing a majority of HIV-1 pseudoviruses.

[0081] Modified LN02 (LN02M) antibodies comprising modified CDR and non-CDR amino acid sequences were also produced using recombinant techniques. In order to identify LN02M broadly neutralizing antibodies with improved viral neutralization properties, a panel of single or multiple amino acid substitutions in LN02 were generated by site directed mutagenesis in expression vectors encoding the heavy or light chain sequences of the LN02 antibody. LN02M antibodies were produced by transient transfection of CHO cells with the wild type vector of the light chain co-transfected with one of the mutant vector for the heavy chain (Table 1, FIG. 6) or the wild type vector for the LN02 heavy chain co-transfected with one of the mutant light chain expression vectors (Table 2, FIG. 6). The transfected CHO cells were maintained in culture for 6 days, the medium was harvested and the mutant LN02 antibodies were purified from the cell culture supernatant with a protein A affinity column using standard protocols. The neutralization activity of the resulting LN02M antibodies was then evaluated in an antibody concentration response inhibition assay using the HIV-1 BaL virus in a TZM-bl luciferase reporter assay. In addition to neutralization activity, the protein production and concentration of mutant LN02 variants in Table 1 and 2 were evaluated to identify mutations that confer benefits in terms of improve antibody production and antibody stability that are needed for therapeutic antibodies. The amino acid sequences of exemplary LN02M variable regions produced and tested in this manner are illustrated in FIGS. 5, 6A through 6E, 7A through 7E, 8A through 8F, as well as SEQ ID NOS. 3-92, 95-233, 248-482, and 491-699.

[0082] Table 1 describes the neutralization activity of antibodies comprising the LN02M variable heavy chain amino acid sequences of SEQ ID NOS. 3-92 (identified in Table 1 and FIG. 6 as LN02 MH01 through MH147). Table 2 describes the neutralization activity of antibodies comprising the LN02M variable light chain amino acid sequences of SEQ ID NOS. 95-233 (identified in Table 2 and FIG. 6 as LN02 ML01 through ML94). Tables 1 and 2 compare the 1050 (mg/ml) against HIV pseudoviruses, and as a ratio to the neutralizing activity of LN02 (i.e., wild-type (WT) LN02 monoclonal antibody). The inhibitory concentration required for 50% neutralization (1050) of the BaL virus is indicated for the LN02 bNabs with heavy chain substitutions (Table 1) or light chain substitutions (Table 2) along with the ratio of wild type LN02 bNab 1050 tested in parallel divided by the mutant LN02 variant 1050. The latter value is used to limit inter-assay variability between viral neutralization assays performed on different days and to identify mutations that could confer a small but significant advantage in terms of neutralization activity to the LN02M relative to the wild type LN02 control. Additional neutralization data for LN02M antibodies are shown in FIGS. 9A through 9I as well as Tables 7A-7B, 8A through 8M, 10A through 10C, 11, 12A through 12D, 13A through 13D, and 14.

[0083] Surprisingly, several of the LN02M antibodies showed higher neutralizing activity than LN02; these include, for instance, the LN02M variable heavy chain regions MH01 (1.59), MH16 (1.69), MH22 (1.18), MH26 (1.40), MH30 (3.37), MH32 (1.32), MH35 (1.91), MH36 (1.37), MH37 (1.75), MH43 (1.90), MH44 (1.38), MH48 (2.12), MH49 (1.71), MH50 (2.74), MH51 (2.46), MH53 (1.45), MH59 (1.31), MH61 (1.43), MH64 (1.52), MH68 (1.12), MH73 (1.83), MH84 (1.16), MH89 (2.26), MH91 (1.36), MH92 (1.45), MH106 (1.16), MH107 (2.19), MH108 (1.91), MH111 (3.34), MH112 (2.77), MH115 (1.41), MH119 (1.32), MH120 (1.55), MH124 (1.67), MH 131 (1.55), MH135 (1.60), MH136 (1.84), MH138 (1.20), and MH146 (1.65); as well as the LN02M variable light chain regions ML01 (1.29), ML02 (1.93), ML05 (1.45), ML08 (2.31), ML10 (1.51), ML11 (1.25), ML12 (3.90), ML31 (5.74), ML32 (1.38), ML44 (1.57), ML49 (1.40), ML51 (1.10), ML52 (1.36), ML60 (1.17), ML71 (1.38), ML73 (1.20), ML74 (1.10), ML79 (1.46), ML84 (1.59), ML85 (9.94), and ML94 (6.42). Of note, LN02H antibodies comprising mutations LN02 MH30, LN02 MH111, LN02 ML12, LN02 ML31, LN02 ML85, LN02 ML92 and LN02 ML94 in Table 1 and 2 all demonstrate greater than 3-fold improved neutralization potency against the BaL virus relative the LN02 wild type control. FIG. 1 provides a summary of the amino acid substitutions in either the heavy or light chain of LN02 that confer an approximately >1.4-fold improved neutralization potency, a minimal effect (1.4- to 0.7-fold difference relative to LN02 WT) on neutralization activity or a <0.7-fold difference relative to wild type LN02 corresponding to mutations that induce a loss in neutralization activity.

### Example 2

[0084] Neutralization of LN02 bNab and LN02 mutant variants against a global panel of eight pseudo-typed HIV-1 viral strains. A preliminary evaluation of the neutralization breadth of a select panel of LN02 bNabs variants with mutations in the heavy and/or light chain of LN02 was performed using a panel of eight pseudo-typed HIV-1 viruses. A summary of the 80% inhibitory concentration (IC₈₀) for each of the LN02 mutants (MH for heavy chain mutations, ML for light chain mutants and MX for mutations in both the heavy and light chain) with each of the eight pseudo-typed viruses (TRO.11, 25710, CD1176, BJOX, CH119, 246-F3, X1632, and CNE55) is shown in FIGS. 2-4. As a reference, FIG. 4 also shows the IC80 values for 3BNC117, 10-1074 and VRC01 against our global panel of pseudo-typed viruses. Representative concentration response viral neutralization curves are shown in FIG. 5 for LN02 mutants including LN02 ML85, LN02 ML8542 and LN02 MX48 that have significantly improved potency relative to the wild type LN02 and an overall improved neutralization profile compared to 10-1074 and 3BNC117 tested in parallel Table 3. Profiling of LN02M against the SVA-MLV pseudotyped virus control in FIG. 5 also demonstrates that the LN02M bNabs do not exhibit non-specific inhibition.

[0085] While certain embodiments have been described in terms of the preferred embodiments, it is understood that variations and modifications will occur to those skilled in the art. Therefore, it is intended that the appended claims cover all such equivalent variations that come within the scope of the following claims.

The application's sequence listing, which the Patent Office published only in electronic form, follows.

SEQUENCE LISTING (700 sequences)

SEQ ID NO: 1 - protein, 109 aa, Artificial Sequence
  Synthetic: LN02_light chain:
SYVLGQSSSMSVAPGQTAKISCWGYYMGSKPVNWYQLKPGRAPSLIISYDDERDSGTPARFSGSHSGSTATLTISNVVPADEADYFCQVWDSKYEEIYFGGGTALTVLG

SEQ ID NO: 2 - protein, 98 aa, Artificial Sequence
  Synthetic: IGLV3-21*01_gl
SYVLTQPPSVSVAPGQTARITCGGNNIGSKSVHWYQQKPGQAPVLVVYDDSDRPSGIPERFSGSNSGNTATLTISRVEAGDEADYYCQVWDSSSDHPT

SEQ ID NO: 3 - protein, 100 aa, Artificial Sequence
  Synthetic: LN02, ML01
SYVLGQSSSMSVAPGQTAKISCWGWYMGTKPVNWYQLKPGRAPSLIISYDDERASGTPARFSGSHSGSTATLTISNVVPADEADYFCQVWDSKYEEIYFG

SEQ ID NO: 4 - protein, 100 aa, Artificial Sequence
  Synthetic: LN02, ML02
SYVLGQSSSMSVAPGQTAKISCWGYWMGTKPVNWYQLKPGRAPSLIISYDDERASGTPARFSGSHSGSTATLTISNVVPADEADYFCQVWDSKYEEIYFG

SEQ ID NO: 5 - protein, 100 aa, Artificial Sequence
  Synthetic: LN02, ML03
SYVLGQSSSMSVAPGQTAKISCWGYYWGTKPVNWYQLKPGRAPSLIISYDDERASGTPARFSGSHSGSTATLTISNVVPADEADYFCQVWDSKYEEIYFG

SEQ ID NO: 6 - protein, 100 aa, Artificial Sequence
  Synthetic: LN02, ML04
SYVLGQSSSMSVAPGQTAKISCWGYYMGWKPVNWYQLKPGRAPSLIISYDDERASGTPARFSGSHSGSTATLTISNVVPADEADYFCQVWDSKYEEIYFG

SEQ ID NO: 7 - protein, 100 aa, Artificial Sequence
  Synthetic: LN02, ML05
SYVLGQSSSMSVAPGQTAKISCWGYYMGAKPVNWYQLKPGRAPSLIISYDDERASGTPARFSGSHSGSTATLTISNVVPADEADYFCQVWDSKYEEIYFG

SEQ ID NO: 8 - protein, 100 aa, Artificial Sequence
  Synthetic: LN02, ML06
SYVLGQSSSMSVAPGQTAKISCWGYYMGTWPVNWYQLKPGRAPSLIISYDDERASGTPARFSGSHSGSTATLTISNVVPADEADYFCQVWDSKYEEIYFG

SEQ ID NO: 9 - protein, 100 aa, Artificial Sequence
  Synthetic: LN02, ML07
SYVLGQSSSMSVAPGQTAKISCWGYYMGTKPVNWYQLKPGRAPSLIIWYDDERASGTPARFSGSHSGSTATLTISNVVPADEADYFCQVWDSKYEEIYFG

SEQ ID NO: 10 - protein, 100 aa, Artificial Sequence
  Synthetic: LN02, ML08
SYVLGQSSSMSVAPGQTAKISCWGYYMGTKPVNWYQLKPGRAPSLIISWDDERASGTPARFSGSHSGSTATLTISNVVPADEADYFCQVWDSKYEEIYFG

SEQ ID NO: 11 - protein, 100 aa, Artificial Sequence
  Synthetic: LN02, ML09
SYVLGQSSSMSVAPGQTAKISCWGYYMGTKPVNWYQLKPGRAPSLIISYDNERASGTPARFSGSHSGSTATLTISNVVPADEADYFCQVWDSKYEEIYFG

SEQ ID NO: 12 - protein, 100 aa, Artificial Sequence
  Synthetic: LN02, ML10
SYVLGQSSSMSVAPGQTAKISCWGYYMGTKPVNWYQLKPGRAPSLIISYDDERAWGTPARFSGSHSGSTATLTISNVVPADEADYFCQVWDSKYEEIYFG

SEQ ID NO: 13 - protein, 100 aa, Artificial Sequence
  Synthetic: LN02, ML11
SYVLGQSSSMSVAPGQTAKISCWGYYMGTKPVNWYQLKPGRAPSLIISYDDERASGTPARFSGSHSGSTATLTISNVVPADEADYFCQVWDSGYEEIYFG

SEQ ID NO: 14 - protein, 100 aa, Artificial Sequence
  Synthetic: LN02, ML12
SYVLGQSSSMSVAPGQTAKISCWGYYMGTKPVNWYQLKPGRAPSLIISYDDERASGTPARFSGSHSGSTATLTISNVVPADEADYFCQVWDSKWEEIYFG

SEQ ID NO: 15 - protein, 100 aa, Artificial Sequence
  Synthetic: LN02, ML13
SYVLGQSSSMSVAPGQTAKISCWGYYMGTKPVNWYQLKPGRAPSLIISYDDERASGTPARFSGSHSGSTATLTISNVVPADEADYFCQVWDSKYEEWYFG

SEQ ID NO: 16 - protein, 100 aa, Artificial Sequence
  Synthetic: LN02, ML14
SYVLGQSSSMSVAPGQTAKISCWGYYMGTKPVNWYQLKPGRAPSLIISYDDERASGTPARFSGSHSGSTATLTISNVVPADEADYFCQVWDSKYEEIWFG

SEQ ID NO: 17 - protein, 100 aa, Artificial Sequence
  Synthetic: LN02, ML15
SYVLGQSSSMSVAPGQTAKISCWGYFMGTKPVNWYQLKPGRAPSLIISYDDERASGTPARFSGSHSGSTATLTISNVVPADEADYFCQVWDSKYEEIYFG

SEQ ID NO: 18 - protein, 100 aa, Artificial Sequence
  Synthetic: LN02, ML16
SYVLGQSSSMSVAPGQTAKISCWGYYFGTKPVNWYQLKPGRAPSLIISYDDERASGTPARFSGSHSGSTATLTISNVVPADEADYFCQVWDSKYEEIYFG

SEQ ID NO: 19 - protein, 100 aa, Artificial Sequence
  Synthetic: LN02, ML17
SYVLGQSSSMSVAPGQTAKISCWGYYLGTKPVNWYQLKPGRAPSLIISYDDERASGTPARFSGSHSGSTATLTISNVVPADEADYFCQVWDSKYEEIYFG

SEQ ID NO: 20 - protein, 100 aa, Artificial Sequence
  Synthetic: LN02, ML18
SYVLGQSSSMSVAPGQTAKISCWGYYMGYKPVNWYQLKPGRAPSLIISYDDERASGTPARFSGSHSGSTATLTISNVVPADEADYFCQVWDSKYEEIYFG

SEQ ID NO: 21 - protein, 100 aa, Artificial Sequence
  Synthetic: LN02, ML19
SYVLGQSSSMSVAPGQTAKISCWGYYMGVKPVNWYQLKPGRAPSLIISYDDERASGTPARFSGSHSGSTATLTISNVVPADEADYFCQVWDSKYEEIYFG

SEQ ID NO: 22 - protein, 100 aa, Artificial Sequence
  Synthetic: LN02, ML21
SYVLGQSSSMSVAPGQTAKISCWGYYMGTKPINWYQLKPGRAPSLIISYDDERASGTPARFSGSHSGSTATLTISNVVPADEADYFCQVWDSKYEEIYFG

SEQ ID NO: 23 - protein, 100 aa, Artificial Sequence
  Synthetic: LN02, ML22
SYVLGQSSSMSVAPGQTAKISCWGYYMGTKPVNWYQLKPGRAPSLIIYYDDERASGTPARFSGSHSGSTATLTISNVVPADEADYFCQVWDSKYEEIYFG

SEQ ID NO: 24 - protein, 100 aa, Artificial Sequence
  Synthetic: LN02, ML23
SYVLGQSSSMSVAPGQTAKISCWGYYMGTKPVNWYQLKPGRAPSLIITYDDERASGTPARFSGSHSGSTATLTISNVVPADEADYFCQVWDSKYEEIYFG

SEQ ID NO: 25 - protein, 100 aa, Artificial Sequence
  Synthetic: LN02, ML24
SYVLGQSSSMSVAPGQTAKISCWGYYMGTKPVNWYQLKPGRAPSLIISYEDERASGTPARFSGSHSGSTATLTISNVVPADEADYFCQVWDSKYEEIYFG

SEQ ID NO: 26 - protein, 100 aa, Artificial Sequence
  Synthetic: LN02, ML25
SYVLGQSSSMSVAPGQTAKISCWGYYMGTKPVNWYQLKPGRAPSLIISYDDWRASGTPARFSGSHSGSTATLTISNVVPADEADYFCQVWDSKYEEIYFG

SEQ ID NO: 27 - protein, 100 aa, Artificial Sequence
  Synthetic: LN02, ML27
SYVLGQSSSMSVAPGQTAKISCWGYYMGTKPVNWYQLKPGRAPSLIISYDDERASGTPARFSGSHSGSTATLTISNVVPADEADYFCYVWDSKYEEIYFG

SEQ ID NO: 28 - protein, 100 aa, Artificial Sequence
  Synthetic: LN02, ML28
SYVLGQSSSMSVAPGQTAKISCWGYYMGTKPVNWYQLKPGRAPSLIISYDDERASGTPARFSGSHSGSTATLTISNVVPADEADYFCQIWDSKYEEIYFG

SEQ ID NO: 29 - protein, 100 aa, Artificial Sequence
  Synthetic: LN02, ML29
SYVLGQSSSMSVAPGQTAKISCWGYYMGTKPVNWYQLKPGRAPSLIISYDDERASGTPARFSGSHSGSTATLTISNVVPADEADYFCQVWESKYEEIYFG

SEQ ID NO: 30 - protein, 100 aa, Artificial Sequence
  Synthetic: LN02, ML30
SYVLGQSSSMSVAPGQTAKISCWGYYMGTKPVNWYQLKPGRAPSLIISYDDERASGTPARFSGSHSGSTATLTISNVVPADEADYFCQVWDSGWEEIYFG

SEQ ID NO: 31 - protein, 100 aa, Artificial Sequence
  Synthetic: LN02, ML31
SYVLGQSSSMSVAPGQTAKISCWGYYMGTKPVNWYQLKPGRAPSLIISYDDERASGTPARFSGSHSGSTATLTISNVVPADEADYFCQVWDSWYEEIYFG

SEQ ID NO: 32 - protein, 100 aa, Artificial Sequence
  Synthetic: LN02, ML32
SYVLGQSSSMSVAPGQTAKISCWGYYMGTKPVNWYQLKPGRAPSLIISYDDERASGTPARFSGSHSGSTATLTISNVVPADEADYFCQVWDSRYEEIYFG

SEQ ID NO: 33 - protein, 100 aa, Artificial Sequence
  Synthetic: LN02, ML34
SYVLGQSSSMSVAPGQTAKISCWGYYMGTKPVNWYQLKPGRAPSLIISYDDERASGTPARFSGSHSGSTATLTISNVVPADEADYFCQVWDSKYEEVYFG

SEQ ID NO: 34 - protein, 100 aa, Artificial Sequence
  Synthetic: LN02, ML35
SYVLGQSSSMSVAPGQTAKISCWGSYMGTKPVNWYQLKPGRAPSLIISYDDERASGTPARFSGSHSGSTATLTISNVVPADEADYFCQVWDSKYEEIYFG

SEQ ID NO: 35 - protein, 100 aa, Artificial Sequence
  Synthetic: LN02, ML36
SYVLGQSSSMSVAPGQTAKISCWGDYMGTKPVNWYQLKPGRAPSLIISYDDERASGTPARFSGSHSGSTATLTISNVVPADEADYFCQVWDSKYEEIYFG

SEQ ID NO: 36 - protein, 100 aa, Artificial Sequence
  Synthetic: LN02, ML37
SYVLGQSSSMSVAPGQTAKISCWGYDMGTKPVNWYQLKPGRAPSLIISYDDERASGTPARFSGSHSGSTATLTISNVVPADEADYFCQVWDSKYEEIYFG

SEQ ID NO: 37 - protein, 100 aa, Artificial Sequence
  Synthetic: LN02, ML38
SYVLGQSSSMSVAPGQTAKISCWGYHMGTKPVNWYQLKPGRAPSLIISYDDERASGTPARFSGSHSGSTATLTISNVVPADEADYFCQVWDSKYEEIYFG

SEQ ID NO: 38 - protein, 100 aa, Artificial Sequence
  Synthetic: LN02, ML39
SYVLGQSSSMSVAPGQTAKISCWGYRMGTKPVNWYQLKPGRAPSLIISYDDERASGTPARFSGSHSGSTATLTISNVVPADEADYFCQVWDSKYEEIYFG

SEQ ID NO: 39 - protein, 100 aa, Artificial Sequence
  Synthetic: LN02, ML40
SYVLGQSSSMSVAPGQTAKISCWGYYIGTKPVNWYQLKPGRAPSLIISYDDERASGTPARFSGSHSGSTATLTISNVVPADEADYFCQVWDSKYEEIYFG

SEQ ID NO: 40 - protein, 100 aa, Artificial Sequence
  Synthetic: LN02, ML41
SYVLGQSSSMSVAPGQTAKISCWGYYMGHKPVNWYQLKPGRAPSLIISYDDERASGTPARFSGSHSGSTATLTISNVVPADEADYFCQVWDSKYEEIYFG

SEQ ID NO: 41 - protein, 100 aa, Artificial Sequence
  Synthetic: LN02, ML42
SYVLGQSSSMSVAPGQTAKISCWGYYMGSKPVNWYQLKPGRAPSLIISYDDERASGTPARFSGSHSGSTATLTISNVVPADEADYFCQVWDSKYEEIYFG

SEQ ID NO: 42 - protein, 100 aa, Artificial Sequence
  Synthetic: LN02, ML44
SYVLGQSSSMSVAPGQTAKISCWGYYMGTYPVNWYQLKPGRAPSLIISYDDERASGTPARFSGSHSGSTATLTISNVVPADEADYFCQVWDSKYEEIYFG

SEQ ID NO: 43 - protein, 100 aa, Artificial Sequence
  Synthetic: LN02, ML45
SYVLGQSSSMSVAPGQTAKISCWGYYMGTEPVNWYQLKPGRAPSLIISYDDERASGTPARFSGSHSGSTATLTISNVVPADEADYFCQVWDSKYEEIYFG

SEQ ID NO: 44 - protein, 100 aa, Artificial Sequence
  Synthetic: LN02, ML46
SYVLGQSSSMSVAPGQTAKISCWGYYMGTKPVEWYQLKPGRAPSLIISYDDERASGTPARFSGSHSGSTATLTISNVVPADEADYFCQVWDSKYEEIYFG

SEQ ID NO: 45 - protein, 100 aa, Artificial Sequence
  Synthetic: LN02, ML47
SYVLGQSSSMSVAPGQTAKISCWGYYMGTKPVNWYQLKPGRAPSLIISFDDERASGTPARFSGSHSGSTATLTISNVVPADEADYFCQVWDSKYEEIYFG

SEQ ID NO: 46 - protein, 100 aa, Artificial Sequence
  Synthetic: LN02, ML48
SYVLGQSSSMSVAPGQTAKISCWGYYMGTKPVNWYQLKPGRAPSLIISYDDEYASGTPARFSGSHSGSTATLTISNVVPADEADYFCQVWDSKYEEIYFG

SEQ ID NO: 47 - protein, 100 aa, Artificial Sequence
  Synthetic: LN02, ML49
SYVLGQSSSMSVAPGQTAKISCWGYYMGTKPVNWYQLKPGRAPSLIISYDDERTSGTPARFSGSHSGSTATLTISNVVPADEADYFCQVWDSKYEEIYFG

SEQ ID NO: 48 - protein, 100 aa, Artificial Sequence
  Synthetic: LN02, ML51
SYVLGQSSSMSVAPGQTAKISCWGYYMGTKPVNWYQLKPGRAPSLIISYDDERAHGTPARFSGSHSGSTATLTISNVVPADEADYFCQVWDSKYEEIYFG

SEQ ID NO: 49 - protein, 100 aa, Artificial Sequence
  Synthetic: LN02, ML52
SYVLGQSSSMSVAPGQTAKISCWGYYMGTKPVNWYQLKPGRAPSLIISYDDERASETPARFSGSHSGSTATLTISNVVPADEADYFCQVWDSKYEEIYFG

SEQ ID NO: 50 - protein, 100 aa, Artificial Sequence; identical to SEQ ID NO: 28
  Synthetic: LN02, ML53

SEQ ID NO: 51 - protein, 100 aa, Artificial Sequence; identical to SEQ ID NO: 29
  Synthetic: LN02, ML54

SEQ ID NO: 52 - protein, 100 aa, Artificial Sequence
  Synthetic: LN02, ML55
SYVLGQSSSMSVAPGQTAKISCWGYYMGTKPVNWYQLKPGRAPSLIISYDDERASGTPARFSGSHSGSTATLTISNVVPADEADYFCQVWDAKYEEIYFG

SEQ ID NO: 53 - protein, 100 aa, Artificial Sequence
  Synthetic: LN02, ML56
SYVLGQSSSMSVAPGQTAKISCWGYYMGTKPVNWYQLKPGRAPSLIISYDDERASGTPARFSGSHSGSTATLTISNVVPADEADYFCQVWDSHYEEIYFG

SEQ ID NO: 54 - protein, 100 aa, Artificial Sequence
  Synthetic: LN02, ML57
SYVLGQSSSMSVAPGQTAKISCWGYYMGTKPVNWYQLKPGRAPSLIISYDDERASGTPARFSGSHSGSTATLTISNVVPADEADYFCQVWDSKYDEIYFG

SEQ ID NO: 55 - protein, 100 aa, Artificial Sequence
  Synthetic: LN02, ML58
SYVLGQSSSMSVAPGQTAKISCWGYYMGTKPVNWYQLKPGRAPSLIISYDDERASGTPARFSGSHSGSTATLTISNVVPADEADYFCQVWDSKYEEITFG

SEQ ID NO: 56 - protein, 100 aa, Artificial Sequence
  Synthetic: LN02, ML60
SYVLGQSSSMSVAPGETAKISCWGYYMGTKPVNWYQLKPGRAPSLIISYDDERASGTPARFSGSHSGSTATLTISNVVPADEADYFCQVWDSKYEEIYFG

SEQ ID NO: 57 - protein, 100 aa, Artificial Sequence
  Synthetic: LN02, ML62
SYVLGQSSSMSVAPGQTAKISCGGYYMGTKPVNWYQLKPGRAPSLIISYDDERASGTPARFSGSHSGSTATLTISNVVPADEADYFCQVWDSKYEEIYFG

SEQ ID NO: 58 - protein, 100 aa, Artificial Sequence
  Synthetic: LN02, ML63
SYVLGQSSSMSVAPGQTAKISCWGYYMGTKSVNWYQLKPGRAPSLIISYDDERASGTPARFSGSHSGSTATLTISNVVPADEADYFCQVWDSKYEEIYFG

SEQ ID NO: 59 - protein, 100 aa, Artificial Sequence
  Synthetic: LN02, ML64
SYVLGQSSSMSVAPGQTAKISCWGYYMGTKGVNWYQLKPGRAPSLIISYDDERASGTPARFSGSHSGSTATLTISNVVPADEADYFCQVWDSKYEEIYFG

SEQ ID NO: 60 - protein, 100 aa, Artificial Sequence; identical to SEQ ID NO: 9
  Synthetic: LN02, ML65

SEQ ID NO: 61 - protein, 100 aa, Artificial Sequence
  Synthetic: LN02, ML66
SYVLGQSSSMSVAPGQTAKISCWGYYMGTKPVNWYQLKPGRAPSLIIFYDDERASGTPARFSGSHSGSTATLTISNVVPADEADYFCQVWDSKYEEIYFG

SEQ ID NO: 62 - protein, 100 aa, Artificial Sequence
  Synthetic: LN02, ML67
SYVLGQSSSMSVAPGQTAKISCWGYYMGTKPVNWYQLKPGRAPSLIISYDQERASGTPARFSGSHSGSTATLTISNVVPADEADYFCQVWDSKYEEIYFG

SEQ ID NO: 63 - protein, 100 aa, Artificial Sequence
  Synthetic: LN02, ML68
SYVLGQSSSMSVAPGQTAKISCWGYYMGTKPVNWYQLKPGRAPSLIISYDEERASGTPARFSGSHSGSTATLTISNVVPADEADYFCQVWDSKYEEIYFG

SEQ ID NO: 64 - protein, 100 aa, Artificial Sequence
  Synthetic: LN02, ML69
SYVLGQSSSMSVAPGQTAKISCWGYYMGTKPVNWYQLKPGRAPSLIISYDYERASGTPARFSGSHSGSTATLTISNVVPADEADYFCQVWDSKYEEIYFG

SEQ ID NO: 65 - protein, 100 aa, Artificial Sequence
  Synthetic: LN02, ML70
SYVLGQSSSMSVAPGQTAKISCWGYYMGTKPVNWYQLKPGRAPSLIISYDDDRASGTPARFSGSHSGSTATLTISNVVPADEADYFCQVWDSKYEEIYFG

SEQ ID NO: 66 - protein, 100 aa, Artificial Sequence
  Synthetic: LN02, ML71
SYVLGQSSSMSVAPGQTAKISCWGYYMGTKPVNWYQLKPGRAPSLIISYDDERADGTPARFSGSHSGSTATLTISNVVPADEADYFCQVWDSKYEEIYFG

SEQ ID NO: 67 - protein, 100 aa, Artificial Sequence
  Synthetic: LN02, ML72
SYVLGQSSSMSVAPGQTAKISCWGYYMGTKPVNWYQLKPGRAPSLIISYDDERAYGTPARFSGSHSGSTATLTISNVVPADEADYFCQVWDSKYEEIYFG

SEQ ID NO: 68 - protein, 100 aa, Artificial Sequence
  Synthetic: LN02, ML73
SYVLGQSSSMSVAPGQTAKISCWGYYMGTKPVNWYQLKPGRAPSLIISYDDERAQGTPARFSGSHSGSTATLTISNVVPADEADYFCQVWDSKYEEIYFG

SEQ ID NO: 69 - protein, 100 aa, Artificial Sequence
  Synthetic: LN02, ML74
SYVLGQSSSMSVAPGQTAKISCWGYYMGTKPVNWYQLKPGRAPSLIISYDDERASGTPERFSGSHSGSTATLTISNVVPADEADYFCQVWDSKYEEIYFG

SEQ ID NO: 70 - protein, 100 aa, Artificial Sequence
  Synthetic: LN02, ML75
SYVLGQSSSMSVAPGQTAKISCWGYYMGTKPVNWYQLKPGRAPSLIISYDDERASGTPARFSGSNSGSTATLTISNVVPADEADYFCQVWDSKYEEIYFG

SEQ ID NO: 71 - protein, 100 aa, Artificial Sequence
  Synthetic: LN02, ML76
SYVLGQSSSMSVAPGQTAKISCWGYYMGTKPVNWYQLKPGRAPSLIISYDDERASGTPARFSGSHSGNTATLTISNVVPADEADYFCQVWDSKYEEIYFG

SEQ ID NO: 72 - protein, 100 aa, Artificial Sequence
  Synthetic: LN02, ML77
SYVLGQSSSMSVAPGQTAKISCWGYYMGTKPVNWYQLKPGRAPSLIISYDDERASGTPARFSGSHSGSTATLTISRVEPADEADYFCQVWDSKYEEIYFG

SEQ ID NO: 73 - protein, 100 aa, Artificial Sequence
  Synthetic: LN02, ML78
SYVLGQSSSMSVAPGQTAKISCWGYYMGTKPVNWYQLKPGRAPSLIISYDDERASGTPARFSGSHSGSTATLTISNVVAGDEADYFCQVWDSKYEEIYFG

SEQ ID NO: 74 - protein, 100 aa, Artificial Sequence
  Synthetic: LN02, ML79
SYVLGQSSSMSVAPGQTAKISCWGYYMGTKPVNWYQLKPGRAPSLIISYDDERASGTPARFSGSHSGSTATLTISNVVPADEADYFCQVWDYKYEEIYFG

SEQ ID NO: 75 - protein, 100 aa, Artificial Sequence
  Synthetic: LN02, ML80
SYVLGQSSSMSVAPGQTAKISCWGYYMGTKPVNWYQLKPGRAPSLIISYDDERASGTPARFSGSHSGSTATLTISNVVPADEADYFCQVWDTKYEEIYFG

SEQ ID NO: 76 - protein, 100 aa, Artificial Sequence
  Synthetic: LN02, ML81
SYVLGQSSSMSVAPGQTAKISCWGYYMGTKPVNWYQLKPGRAPSLIISYDDERASGTPARFSGSHSGSTATLTISNVVPADEADYFCQVWDMKYEEIYFG

SEQ ID NO: 77 - protein, 100 aa, Artificial Sequence
  Synthetic: LN02, ML82
SYVLGQSSSMSVAPGQTAKISCWGYYMGTKPVNWYQLKPGRAPSLIISYDDERASGTPARFSGSHSGSTATLTISNVVPADEADYFCQVWDHKYEEIYFG

SEQ ID NO: 78 - protein, 100 aa, Artificial Sequence
  Synthetic: LN02, ML83
SYVLGQSSSMSVAPGQTAKISCWGYYMGTKPVNWYQLKPGRAPSLIISYDDERASGTPARFSGSHSGSTATLTISNVVPADEADYFCQVWDDKYEEIYFG

SEQ ID NO: 79 - protein, 100 aa, Artificial Sequence
  Synthetic: LN02, ML84
SYVLGQSSSMSVAPGQTAKISCWGYYMGTKPVNWYQLKPGRAPSLIISYDDERASGTPARFSGSHSGSTATLTISNVVPADEADYFCQVWDQKYEEIYFG

SEQ ID NO: 80 - protein, 100 aa, Artificial Sequence
  Synthetic: LN02, ML85
SYVLGQSSSMSVAPGQTAKISCWGYYMGTKPVNWYQLKPGRAPSLIISYDDERASGTPARFSGSHSGSTATLTISNVVPADEADYFCQVWDSYYEEIYFG

SEQ ID NO: 81 - protein, 100 aa, Artificial Sequence
  Synthetic: LN02, ML86
SYVLGQSSSMSVAPGQTAKISCWGYYMGTKPVNWYQLKPGRAPSLIISYDDERASGTPARFSGSHSGSTATLTISNVVPADEADYFCQVWDSTYEEIYFG

SEQ ID NO: 82 - protein, 100 aa, Artificial Sequence; identical to SEQ ID NO: 53
  Synthetic: LN02, ML87

SEQ ID NO: 83 - protein, 100 aa, Artificial Sequence
  Synthetic: LN02, ML88
SYVLGQSSSMSVAPGQTAKISCWGYYMGTKPVNWYQLKPGRAPSLIISYDDERASGTPARFSGSHSGSTATLTISNVVPADEADYFCQVWDSKYYEIYFG

SEQ ID NO: 84 - protein, 100 aa, Artificial Sequence
  Synthetic: LN02, ML89
SYVLGQSSSMSVAPGQTAKISCWGYYMGTKPVNWYQLKPGRAPSLIISYDDERASGTPARFSGSHSGSTATLTISNVVPADEADYFCQVWDSKYREIYFG

SEQ ID NO: 85 - protein, 100 aa, Artificial Sequence
  Synthetic: LN02, ML90
SYVLGQSSSMSVAPGQTAKISCWGYYMGTKPVNWYQLKPGRAPSLIISYDDERASGTPARFSGSHSGSTATLTISNVVPADEADYFCQVWDSKYHEIYFG

SEQ ID NO: 86 - protein, 100 aa, Artificial Sequence
  Synthetic: LN02, ML91
SYVLGQSSSMSVAPGQTAKISCWGYYMGTKPVNWYQLKPGRAPSLIISYDDERASGTPARFSGSHSGSTATLTISNVVPADEADYFCQVWDSKYEEIFFG

SEQ ID NO: 87 - protein, 100 aa, Artificial Sequence
  Synthetic: LN02, ML92
SYVLGQSSSMSVAPGQTAKISCWGYYMGTKPVNWYQLKPGRAPSLIISYDDERASGTPARFSGSHSGSTATLTISNVVPADEADYFCQVWDSKWREIYFG

SEQ ID NO: 88 - protein, 100 aa, Artificial Sequence
  Synthetic: LN02, ML93
SYVLGQSSSMSVAPGQTAKISCWGYYMGTKPVNWYQLKPGRAPSLIISYDDERASGTPARFSGSHSGSTATLTISNVVPADEADYFCQVWFSWYREIYFG

SEQ ID NO: 89 - protein, 100 aa, Artificial Sequence
  Synthetic: LN02, ML94
SYVLGQSSSMSVAPGQTAKISCWGYYMGTKPVNWYQLKPGRAPSLIISYDDERASGTPARFSGSHSGSTATLTISNVVPADEADYFCQVWDSRWEEIYFG

SEQ ID NO: 90 - protein, 100 aa, Artificial Sequence
  Synthetic: LN02, ML8542
SYVLGQSSSMSVAPGQTAKISCWGYYMGSKPVNWYQLKPGRAPSLIISYDDERASGTPARFSGSHSGSTATLTISNVVPADEADYFCQVWDSYYEEIYFG

SEQ ID NO: 91 - protein, 100 aa, Artificial Sequence
  Synthetic: LN02, ML8544
SYVLGQSSSMSVAPGQTAKISCWGYYMGTYPVNWYQLKPGRAPSLIISYDDERASGTPARFSGSHSGSTATLTISNVVPADEADYFCQVWDSYYEEIYFG

SEQ ID NO: 92 - protein, 100 aa, Artificial Sequence
  Synthetic: LN02, ML8552
SYVLGQSSSMSVAPGQTAKISCWGYYMGTKPVNWYQLKPGRAPSLIISYDDERASETPARFSGSHSGSTATLTISNVVPADEADYFCQVWDSYYEEIYFG

SEQ ID NO: 93 - protein, 116 aa, Artificial Sequence
  Synthetic: LN02_HEAVY CHAIN
QAPLPESGPGVVRPTGTLSLTCTAAYGSISRHFWGWVRQSPQGTLEWIAHMHHLGVKYVNPSLKNRVSISMDTSKNQMSLTLKTVTATDAAKYHCVRMGARMSDIAFFSFGDWGPG

SEQ ID NO: 94 - protein, 98 aa, Artificial Sequence
  Synthetic: IGHV4-4*02_GL
QVQLQESGPGLVKPSGTLSLTCAVSGGSISSSNWWSWVRQPPGKGLEWIGEIYHSGSTNYNPSLKSRVTISVDKSKNQFSLKLSSVTAADTAVYYCAR

SEQ ID NO: 95 - protein, 116 aa, Artificial Sequence
  Synthetic: LN02, MH01
WAPLPESGPGVVRPTGTLSLTCTAAYGSISRHFWGWVRQSPQGTLEWIAHMHHLGVKYVNPSLKNRVSISMDTSKNQMSLTLKTVTATDAAKYHCVRMGARMSDIAFFSFGDWGPG

SEQ ID NO: 96 - protein, 116 aa, Artificial Sequence
  Synthetic: LN02, MH02
QAPLPESGPGVVRPTGTLWLTCTAAYGSISRHFWGWVRQSPQGTLEWIAHMHHLGVKYVNPSLKNRVSISMDTSKNQMSLTLKTVTATDAAKYHCVRMGARMSDIAFFSFGDWGPG

SEQ ID NO: 97 - protein, 116 aa, Artificial Sequence
  Synthetic: LN02, MH03
QAPLPESGPGVVRPTGTLSLWCTAAYGSISRHFWGWVRQSPQGTLEWIAHMHHLGVKYVNPSLKNRVSISMDTSKNQMSLTLKTVTATDAAKYHCVRMGARMSDIAFFSFGDWGPG

SEQ ID NO: 98 - protein, 116 aa, Artificial Sequence
  Synthetic: LN02, MH04
QAPLPESGPGVVRPTGTLSLTCTAAWGSISRHFWGWVRQSPQGTLEWIAHMHHLGVKYVNPSLKNRVSISMDTSKNQMSLTLKTVTATDAAKYHCVRMGARMSDIAFFSFGDWGPG

SEQ ID NO: 99 - protein, 116 aa, Artificial Sequence
  Synthetic: LN02, MH05
QAPLPESGPGVVRPTGTLSLTCTAAYGWISRHFWGWVRQSPQGTLEWIAHMHHLGVKYVNPSLKNRVSISMDTSKNQMSLTLKTVTATDAAKYHCVRMGARMSDIAFFSFGDWGPG

SEQ ID NO: 100 - protein, 116 aa, Artificial Sequence
  Synthetic: LN02, MH06
QAPLPESGPGVVRPTGTLSLTCTAAYGSIWRHFWGWVRQSPQGTLEWIAHMHHLGVKYVNPSLKNRVSISMDTSKNQMSLTLKTVTATDAAKYHCVRMGARMSDIAFFSFGDWGPG

SEQ ID NO: 101 - protein, 116 aa, Artificial Sequence
  Synthetic: LN02, MH07
QAPLPESGPGVVRPTGTLSLTCTAAYGSISWHFWGWVRQSPQGTLEWIAHMHHLGVKYVNPSLKNRVSISMDTSKNQMSLTLKTVTATDAAKYHCVRMGARMSDIAFFSFGDWGPG

SEQ ID NO: 102 - protein, 116 aa, Artificial Sequence
  Synthetic: LN02, MH08
QAPLPESGPGVVRPTGTLSLTCTAAYGSISRWFWGWVRQSPQGTLEWIAHMHHLGVKYVNPSLKNRVSISMDTSKNQMSLTLKTVTATDAAKYHCVRMGARMSDIAFFSFGDWGPG

SEQ ID NO: 103 - protein, 116 aa, Artificial Sequence
  Synthetic: LN02, MH09
QAPLPESGPGVVRPTGTLSLTCTAAYGSISRHWWGWVRQSPQGTLEWIAHMHHLGVKYVNPSLKNRVSISMDTSKNQMSLTLKTVTATDAAKYHCVRMGARMSDIAFFSFGDWGPG

SEQ ID NO: 104 - protein, 116 aa, Artificial Sequence
  Synthetic: LN02, MH10
QAPLPESGPGVVRPTGTLSLTCTAAYGSISRHFWGWVRQSPQGTLEWIAHWHHLGVKYVNPSLKNRVSISMDTSKNQMSLTLKTVTATDAAKYHCVRMGARMSDIAFFSFGDWGPG

SEQ ID NO: 105 - protein, 116 aa, Artificial Sequence
  Synthetic: LN02, MH11
QAPLPESGPGVVRPTGTLSLTCTAAYGSISRHFWGWVRQSPQGTLEWIAHMHHWGVKYVNPSLKNRVSISMDTSKNQMSLTLKTVTATDAAKYHCVRMGARMSDIAFFSFGDWGPG

SEQ ID NO: 106 - protein, 116 aa, Artificial Sequence
  Synthetic: LN02, MH12
QAPLPESGPGVVRPTGTLSLTCTAAYGSISRHFWGWVRQSPQGTLEWIAHMHHLDVKYVNPSLKNRVSISMDTSKNQMSLTLKTVTATDAAKYHCVRMGARMSDIAFFSFGDWGPG

SEQ ID NO: 107 - protein, 116 aa, Artificial Sequence
  Synthetic: LN02, MH13
QAPLPESGPGVVRPTGTLSLTCTAAYGSISRHFWGWVRQSPQGTLEWIAHMHHLGWKYVNPSLKNRVSISMDTSKNQMSLTLKTVTATDAAKYHCVRMGARMSDIAFFSFGDWGPG

SEQ ID NO: 108 - protein, 116 aa, Artificial Sequence
  Synthetic: LN02, MH14
QAPLPESGPGVVRPTGTLSLTCTAAYGSISRHFWGWVRQSPQGTLEWIAHMHHLGVWYVNPSLKNRVSISMDTSKNQMSLTLKTVTATDAAKYHCVRMGARMSDIAFFSFGDWGPG

SEQ ID NO: 109 - protein, 116 aa, Artificial Sequence
  Synthetic: LN02, MH15
QAPLPESGPGVVRPTGTLSLTCTAAYGSISRHFWGWVRQSPQGTLEWIAHMHHLGVKEVNPSLKNRVSISMDTSKNQMSLTLKTVTATDAAKYHCVRMGARMSDIAFFSFGDWGPG

SEQ ID NO: 110 - protein, 116 aa, Artificial Sequence
  Synthetic: LN02, MH16
QAPLPESGPGVVRPTGTLSLTCTAAYGSISRHFWGWVRQSPQGTLEWIAHMHHLGVKYVNPSWKNRVSISMDTSKNQMSLTLKTVTATDAAKYHCVRMGARMSDIAFFSFGDWGPG

SEQ ID NO: 111 - protein, 116 aa, Artificial Sequence
  Synthetic: LN02, MH17
QAPLPESGPGVVRPTGTLSLTCTAAYGSISRHFWGWVRQSPQGTLEWIAHMHHLGVKYVNPSLKWRVSISMDTSKNQMSLTLKTVTATDAAKYHCVRMGARMSDIAFFSFGDWGPG

SEQ ID NO: 112 - protein, 116 aa, Artificial Sequence
  Synthetic: LN02, MH18
QAPLPESGPGVVRPTGTLSLTCTAAYGSISRHFWGWVRQSPQGTLEWIAHMHHLGVKYVNPSLKSRVSISMDTSKNQMSLTLKTVTATDAAKYHCVRMGARMSDIAFFSFGDWGPG

SEQ ID NO: 113 - protein, 116 aa, Artificial Sequence
  Synthetic: LN02, MH19
QAPLPESGPGVVRPTGTLSLTCTAAYGSISRHFWGWVRQSPQGTLEWIAHMHHLGVKYVNPSLKNRVWISMDTSKNQMSLTLKTVTATDAAKYHCVRMGARMSDIAFFSFGDWGPG

SEQ ID NO: 114 - protein, 116 aa, Artificial Sequence
  Synthetic: LN02, MH20
QAPLPESGPGVVRPTGTLSLTCTAAYGSISRHFWGWVRQSPQGTLEWIAHMHHLGVKYVNPSLKNRVSISMWTSKNQMSLTLKTVTATDAAKYHCVRMGARMSDIAFFSFGDWGPG

SEQ ID NO: 115 - protein, 116 aa, Artificial Sequence
  Synthetic: LN02, MH21
QAPLPESGPGVVRPTGTLSLTCTAAYGSISRHFWGWVRQSPQGTLEWIAHMHHLGVKYVNPSLKNRVSISMDWSKNQMSLTLKTVTATDAAKYHCVRMGARMSDIAFFSFGDWGPG

SEQ ID NO: 116 - protein, 116 aa, Artificial Sequence
  Synthetic: LN02, MH22
QAPLPESGPGVVRPTGTLSLTCTAAYGSISRHFWGWVRQSPQGTLEWIAHMHHLGVKYVNPSLKNRVSISMDTWKNQMSLTLKTVTATDAAKYHCVRMGARMSDIAFFSFGDWGPG

SEQ ID NO: 117 - protein, 116 aa, Artificial Sequence
  Synthetic: LN02, MH23
QAPLPESGPGVVRPTGTLSLTCTAAYGSISRHFWGWVRQSPQGTLEWIAHMHHLGVKYVNPSLKNRVSISMDTSWNQMSLTLKTVTATDAAKYHCVRMGARMSDIAFFSFGDWGPG

SEQ ID NO: 118 - protein, 116 aa, Artificial Sequence
  Synthetic: LN02, MH24
QAPLPESGPGVVRPTGTLSLTCTAAYGSISRHFWGWVRQSPQGTLEWIAHMHHLGVKYVNPSLKNRVSISMDTSKWQMSLTLKTVTATDAAKYHCVRMGARMSDIAFFSFGDWGPG

SEQ ID NO: 119 - protein, 116 aa, Artificial Sequence
  Synthetic: LN02, MH25
QAPLPESGPGVVRPTGTLSLTCTAAYGSISRHFWGWVRQSPQGTLEWIAHMHHLGVKYVNPSLKNRVSISMDTSKNQMSLTLKTVTATDAAKYYCVRMGARMSDIAFFSFGDWGPG

SEQ ID NO: 120 - protein, 116 aa, Artificial Sequence
  Synthetic: LN02, MH26
QAPLPESGPGVVRPTGTLSLTCTAAYGSISRHFWGWVRQSPQGTLEWIAHMHHLGVKYVNPSLKNRVSISMDTSKNQMSLTLKTVTATDAAKYHCVRIGARMSDIAFFSFGDWGPG

SEQ ID NO: 121 - protein, 116 aa, Artificial Sequence
  Synthetic: LN02, MH27
QAPLPESGPGVVRPTGTLSLTCTAAYGSISRHFWGWVRQSPQGTLEWIAHMHHLGVKYVNPSLKNRVSISMDTSKNQMSLTLKTVTATDAAKYHCVRMGAWMSDIAFFSFGDWGPG

SEQ ID NO: 122 - protein, 116 aa, Artificial Sequence
  Synthetic: LN02, MH28
QAPLPESGPGVVRPTGTLSLTCTAAYGSISRHFWGWVRQSPQGTLEWIAHMHHLGVKYVNPSLKNRVSISMDTSKNQMSLTLKTVTATDAAKYHCVRMGARWSDIAFFSFGDWGPG

SEQ ID NO: 123 - protein, 116 aa, Artificial Sequence
  Synthetic: LN02, MH29
QAPLPESGPGVVRPTGTLSLTCTAAYGSISRHFWGWVRQSPQGTLEWIAHMHHLGVKYVNPSLKNRVSISMDTSKNQMSLTLKTVTATDAAKYHCVRMGARASDIAFFSFGDWGPG

SEQ ID NO: 124 - protein, 116 aa, Artificial Sequence
  Synthetic: LN02, MH30
QAPLPESGPGVVRPTGTLSLTCTAAYGSISRHFWGWVRQSPQGTLEWIAHMHHLGVKYVNPSLKNRVSISMDTSKNQMSLTLKTVTATDAAKYHCVRMGARMWDIAFFSFGDWGPG

SEQ ID NO: 125 - protein, 116 aa, Artificial Sequence
  Synthetic: LN02, MH31
QAPLPESGPGVVRPTGTLSLTCTAAYGSISRHFWGWVRQSPQGTLEWIAHMHHLGVKYVNPSLKNRVSISMDTSKNQMSLTLKTVTATDAAKYHCVRMGARMADIAFFSFGDWGPG

SEQ ID NO: 126 - protein, 116 aa, Artificial Sequence
  Synthetic: LN02, MH32
QAPLPESGPGVVRPTGTLSLTCTAAYGSISRHFWGWVRQSPQGTLEWIAHMHHLGVKYVNPSLKNRVSISMDTSKNQMSLTLKTVTATDAAKYHCVRMGARMSWIAFFSFGDWGPG

SEQ ID NO: 127 - protein, 116 aa, Artificial Sequence
  Synthetic: LN02, MH33
QAPLPESGPGVVRPTGTLSLTCTAAYGSISRHFWGWVRQSPQGTLEWIAHMHHLGVKYVNPSLKNRVSISMDTSKNQMSLTLKTVTATDAAKYHCVRMGARMSDWAFFSFGDWGPG

SEQ ID NO: 128 - protein, 116 aa, Artificial Sequence
  Synthetic: LN02, MH34
QAPLPESGPGVVRPTGTLSLTCTAAYGSISRHFWGWVRQSPQGTLEWIAHMHHLGVKYVNPSLKNRVSISMDTSKNQMSLTLKTVTATDAAKYHCVRMGARMSDIWFFSFGDWGPG

SEQ ID NO: 129 - protein, 116 aa, Artificial Sequence
  Synthetic: LN02, MH35
QAPLPESGPGVVRPTGTLSLTCTAAYGSISRHFWGWVRQSPQGTLEWIAHMHHLGVKYVNPSLKNRVSISMDTSKNQMSLTLKTVTATDAAKYHCVRMGARMSDIQFFSFGDWGPG

SEQ ID NO: 130 - protein, 116 aa, Artificial Sequence
  Synthetic: LN02, MH36
QAPLPESGPGVVRPTGTLSLTCTAAYGSISRHFWGWVRQSPQGTLEWIAHMHHLGVKYVNPSLKNRVSISMDTSKNQMSLTLKTVTATDAAKYHCVRMGARMSDIAWFSFGDWGPG

SEQ ID NO: 131 - protein, 116 aa, Artificial Sequence
  Synthetic: LN02, MH37
QAPLPESGPGVVRPTGTLSLTCTAAYGSISRHFWGWVRQSPQGTLEWIAHMHHLGVKYVNPSLKNRVSISMDTSKNQMSLTLKTVTATDAAKYHCVRMGARMSDIAFYSFGDWGPG

SEQ ID NO: 132 - protein, 116 aa, Artificial Sequence
  Synthetic: LN02, MH38
QAPLPESGPGVVRPTGTLSLTCTAAYGSISRHFWGWVRQSPQGTLEWIAHMHHLGVKYVNPSLKNRVSISMDTSKNQMSLTLKTVTATDAAKYHCVRMGARMSDIAFFAFGDWGPG

SEQ ID NO: 133 - protein, 116 aa, Artificial Sequence
  Synthetic: LN02, MH39
QAPLPESGPGVVRPTGTLSLTCTAAYGSISRHFWGWVRQSPQGTLEWIAHMHHLGVKYVNPSLKNRVSISMDTSKNQMSLTLKTVTATDAAKYHCVRMGARMSDIAFFSWGDWGPG

SEQ ID NO: 134 - protein, 116 aa, Artificial Sequence
  Synthetic: LN02, MH40
QAPLPESGPGVVRPTGTLSLTCTAAYGSISRHFWGWVRQSPQGTLEWIAHMHHLGVKYVNPSLKNRVSISMDTSKNQMSLTLKTVTATDAAKYHCVRMGARMSDIAFFSFDGWGPG

SEQ ID NO: 135 - protein, 116 aa, Artificial Sequence
  Synthetic: LN02, MH41
QAPLPESGPGVVRPTGTLSLTCTAAYGSISRHFWGWVRQSPQGTLEWIAHMHHLGVKYVNPSLKNRVSISMDTSKNQMSLTLKTVTATDAAKYHCVRMGARMSDIAFFSFGDWGWG

SEQ ID NO: 136 - protein, 116 aa, Artificial Sequence
  Synthetic: LN02, MH43
QAPLPESGPGVVRPTGTLHLTCTAAYGSISRHFWGWVRQSPQGTLEWIAHMHHLGVKYVNPSLKNRVSISMDTSKNQMSLTLKTVTATDAAKYHCVRMGARMSDIAFFSFGDWGPG

SEQ ID NO: 137 - protein, 116 aa, Artificial Sequence
  Synthetic: LN02, MH44
QAPLPESGPGVVRPTGTLSLYCTAAYGSISRHFWGWVRQSPQGTLEWIAHMHHLGVKYVNPSLKNRVSISMDTSKNQMSLTLKTVTATDAAKYHCVRMGARMSDIAFFSFGDWGPG

SEQ ID NO: 138 - protein, 116 aa, Artificial Sequence
  Synthetic: LN02, MH45
QAPLPESGPGVVRPTGTLSLTCTAADGSISRHFWGWVRQSPQGTLEWIAHMHHLGVKYVNPSLKNRVSISMDTSKNQMSLTLKTVTATDAAKYHCVRMGARMSDIAFFSFGDWGPG

SEQ ID NO: 139 - protein, 116 aa, Artificial Sequence
  Synthetic: LN02, MH46
QAPLPESGPGVVRPTGTLSLTCTAAHGSISRHFWGWVRQSPQGTLEWIAHMHHLGVKYVNPSLKNRVSISMDTSKNQMSLTLKTVTATDAAKYHCVRMGARMSDIAFFSFGDWGPG

SEQ ID NO: 140 - protein, 116 aa, Artificial Sequence
  Synthetic: LN02, MH47
QAPLPESGPGVVRPTGTLSLTCTAARGSISRHFWGWVRQSPQGTLEWIAHMHHLGVKYVNPSLKNRVSISMDTSKNQMSLTLKTVTATDAAKYHCVRMGARMSDIAFFSFGDWGPG

SEQ ID NO: 141 - protein, 116 aa, Artificial Sequence
  Synthetic: LN02, MH48
QAPLPESGPGVVRPTGTLSLTCTAAYGYISRHFWGWVRQSPQGTLEWIAHMHHLGVKYVNPSLKNRVSISMDTSKNQMSLTLKTVTATDAAKYHCVRMGARMSDIAFFSFGDWGPG

SEQ ID NO: 142 - protein, 116 aa, Artificial Sequence
  Synthetic: LN02, MH49
QAPLPESGPGVVRPTGTLSLTCTAAYGQISRHFWGWVRQSPQGTLEWIAHMHHLGVKYVNPSLKNRVSISMDTSKNQMSLTLKTVTATDAAKYHCVRMGARMSDIAFFSFGDWGPG

SEQ ID NO: 143 - protein, 116 aa, Artificial Sequence
  Synthetic: LN02, MH50
QAPLPESGPGVVRPTGTLSLTCTAAYGTISRHFWGWVRQSPQGTLEWIAHMHHLGVKYVNPSLKNRVSISMDTSKNQMSLTLKTVTATDAAKYHCVRMGARMSDIAFFSFGDWGPG

SEQ ID NO: 144 - protein, 116 aa, Artificial Sequence
  Synthetic: LN02, MH51
QAPLPESGPGVVRPTGTLSLTCTAAYGSITRHFWGWVRQSPQGTLEWIAHMHHLGVKYVNPSLKNRVSISMDTSKNQMSLTLKTVTATDAAKYHCVRMGARMSDIAFFSFGDWGPG

SEQ ID NO: 145 - protein, 116 aa, Artificial Sequence
  Synthetic: LN02, MH52
QAPLPESGPGVVRPTGTLSLTCTAAYGSISRYFWGWVRQSPQGTLEWIAHMHHLGVKYVNPSLKNRVSISMDTSKNQMSLTLKTVTATDAAKYHCVRMGARMSDIAFFSFGDWGPG

SEQ ID NO: 146 - protein, 116 aa, Artificial Sequence
  Synthetic: LN02, MH53
QAPLPESGPGVVRPTGTLSLTCTAAYGSISRHYWGWVRQSPQGTLEWIAHMHHLGVKYVNPSLKNRVSISMDTSKNQMSLTLKTVTATDAAKYHCVRMGARMSDIAFFSFGDWGPG

SEQ ID NO: 147 - protein, 116 aa, Artificial Sequence
  Synthetic: LN02, MH54
QAPLPESGPGVVRPTGTLSLTCTAAYGSISRHWFGWVRQSPQGTLEWIAHMHHLGVKYVNPSLKNRVSISMDTSKNQMSLTLKTVTATDAAKYHCVRMGARMSDIAFFSFGDWGPG

SEQ ID NO: 148 - protein, 116 aa, Artificial Sequence
  Synthetic: LN02, MH55
QAPLPESGPGVVRPTGTLSLTCTAAYGSISRHFWGWVRQSPQGTLEWIAYMHHLGVKYVNPSLKNRVSISMDTSKNQMSLTLKTVTATDAAKYHCVRMGARMSDIAFFSFGDWGPG

SEQ ID NO: 149 - protein, 116 aa, Artificial Sequence
  Synthetic: LN02, MH56
QAPLPESGPGVVRPTGTLSLTCTAAYGSISRHFWGWVRQSPQGTLEWIAHIHHLGVKYVNPSLKNRVSISMDTSKNQMSLTLKTVTATDAAKYHCVRMGARMSDIAFFSFGDWGPG

SEQ ID NO: 150 - protein, 116 aa, Artificial Sequence
  Synthetic: LN02, MH57
QAPLPESGPGVVRPTGTLSLTCTAAYGSISRHFWGWVRQSPQGTLEWIAHMYHLGVKYVNPSLKNRVSISMDTSKNQMSLTLKTVTATDAAKYHCVRMGARMSDIAFFSFGDWGPG

SEQ ID NO: 151 - protein, 116 aa, Artificial Sequence
  Synthetic: LN02, MH59
QAPLPESGPGVVRPTGTLSLTCTAAYGSISRHFWGWVRQSPQGTLEWIAHMHHFGVKYVNPSLKNRVSISMDTSKNQMSLTLKTVTATDAAKYHCVRMGARMSDIAFFSFGDWGPG

SEQ ID NO: 152 - protein, 116 aa, Artificial Sequence
  Synthetic: LN02, MH60
QAPLPESGPGVVRPTGTLSLTCTAAYGSISRHFWGWVRQSPQGTLEWIAHMHHLGVDYVNPSLKNRVSISMDTSKNQMSLTLKTVTATDAAKYHCVRMGARMSDIAFFSFGDWGPG

SEQ ID NO: 153 - protein, 116 aa, Artificial Sequence
  Synthetic: LN02, MH61
QAPLPESGPGVVRPTGTLSLTCTAAYGSISRHFWGWVRQSPQGTLEWIAHMHHLGVKDVNPSLKNRVSISMDTSKNQMSLTLKTVTATDAAKYHCVRMGARMSDIAFFSFGDWGPG

SEQ ID NO: 154 - protein, 116 aa, Artificial Sequence
  Synthetic: LN02, MH62
QAPLPESGPGVVRPTGTLSLTCTAAYGSISRHFWGWVRQSPQGTLEWIAHMHHLGVKQVNPSLKNRVSISMDTSKNQMSLTLKTVTATDAAKYHCVRMGARMSDIAFFSFGDWGPG

SEQ ID NO: 155 - protein, 116 aa, Artificial Sequence
  Synthetic: LN02, MH63
QAPLPESGPGVVRPTGTLSLTCTAAYGSISRHFWGWVRQSPQGTLEWIAHMHHLGVKHVNPSLKNRVSISMDTSKNQMSLTLKTVTATDAAKYHCVRMGARMSDIAFFSFGDWGPG

SEQ ID NO: 156 - protein, 116 aa, Artificial Sequence
  Synthetic: LN02, MH64
QAPLPESGPGVVRPTGTLSLTCTAAYGSISRHFWGWVRQSPQGTLEWIAHMHHLGVKYSNPSLKNRVSISMDTSKNQMSLTLKTVTATDAAKYHCVRMGARMSDIAFFSFGDWGPG

SEQ ID NO: 157 - protein, 116 aa, Artificial Sequence
  Synthetic: LN02, MH65
QAPLPESGPGVVRPTGTLSLTCTAAYGSISRHFWGWVRQSPQGTLEWIAHMHHLGVKYVNPSFKNRVSISMDTSKNQMSLTLKTVTATDAAKYHCVRMGARMSDIAFFSFGDWGPG

SEQ ID NO: 158 - protein, 116 aa, Artificial Sequence
  Synthetic: LN02, MH67
QAPLPESGPGVVRPTGTLSLTCTAAYGSISRHFWGWVRQSPQGTLEWIAHMHHLGVKYVNPSLKNRVSISMDTSKNQMSLTLKTVTATDAAKYHCARMGARMSDIAFFSFGDWGPG

SEQ ID NO: 159 - protein, 116 aa, Artificial Sequence; identical to SEQ ID NO: 120
  Synthetic: LN02, MH68

SEQ ID NO: 160 - protein, 116 aa, Artificial Sequence
  Synthetic: LN02, MH69
QAPLPESGPGVVRPTGTLSLTCTAAYGSISRHFWGWVRQSPQGTLEWIAHMHHLGVKYVNPSLKNRVSISMDTSKNQMSLTLKTVTATDAAKYHCVRYGARMSDIAFFSFGDWGPG

SEQ ID NO: 161 - protein, 116 aa, Artificial Sequence
  Synthetic: LN02, MH70
QAPLPESGPGVVRPTGTLSLTCTAAYGSISRHFWGWVRQSPQGTLEWIAHMHHLGVKYVNPSLKNRVSISMDTSKNQMSLTLKTVTATDAAKYHCVRMGTRMSDIAFFSFGDWGPG

SEQ ID NO: 162 - protein, 116 aa, Artificial Sequence
  Synthetic: LN02, MH72
QAPLPESGPGVVRPTGTLSLTCTAAYGSISRHFWGWVRQSPQGTLEWIAHMHHLGVKYVNPSLKNRVSISMDTSKNQMSLTLKTVTATDAAKYHCVRMGAIRSDIAFFSFGDWGPG

SEQ ID NO: 163 - protein, 116 aa, Artificial Sequence
  Synthetic: LN02, MH73
QAPLPESGPGVVRPTGTLSLTCTAAYGSISRHFWGWVRQSPQGTLEWIAHMHHLGVKYVNPSLKNRVSISMDTSKNQMSLTLKTVTATDAAKYHCVRMGARMYDIAFFSFGDWGPG

SEQ ID NO: 164 - protein, 116 aa, Artificial Sequence
  Synthetic: LN02, MH74
QAPLPESGPGVVRPTGTLSLTCTAAYGSISRHFWGWVRQSPQGTLEWIAHMHHLGVKYVNPSLKNRVSISMDTSKNQMSLTLKTVTATDAAKYHCVRMGARMTDIAFFSFGDWGPG

SEQ ID NO: 165 - protein, 116 aa, Artificial Sequence
  Synthetic: LN02, MH75
QAPLPESGPGVVRPTGTLSLTCTAAYGSISRHFWGWVRQSPQGTLEWIAHMHHLGVKYVNPSLKNRVSISMDTSKNQMSLTLKTVTATDAAKYHCVRMGARMHDIAFFSFGDWGPG

SEQ ID NO: 166 - protein, 116 aa, Artificial Sequence
  Synthetic: LN02, MH76
QAPLPESGPGVVRPTGTLSLTCTAAYGSISRHFWGWVRQSPQGTLEWIAHMHHLGVKYVNPSLKNRVSISMDTSKNQMSLTLKTVTATDAAKYHCVRMGARMDDIAFFSFGDWGPG

SEQ ID NO: 167 - protein, 116 aa, Artificial Sequence
  Synthetic: LN02, MH77
QAPLPESGPGVVRPTGTLSLTCTAAYGSISRHFWGWVRQSPQGTLEWIAHMHHLGVKYVNPSLKNRVSISMDTSKNQMSLTLKTVTATDAAKYHCVRMGARMVDIAFFSFGDWGPG

SEQ ID NO: 168 - protein, 116 aa, Artificial Sequence
  Synthetic: LN02, MH78
QAPLPESGPGVVRPTGTLSLTCTAAYGSISRHFWGWVRQSPQGTLEWIAHMHHLGVKYVNPSLKNRVSISMDTSKNQMSLTLKTVTATDAAKYHCVRMGARMQDIAFFSFGDWGPG

SEQ ID NO: 169 - protein, 116 aa, Artificial Sequence
  Synthetic: LN02, MH79
QAPLPESGPGVVRPTGTLSLTCTAAYGSISRHFWGWVRQSPQGTLEWIAHMHHLGVKYVNPSLKNRVSISMDTSKNQMSLTLKTVTATDAAKYHCVRMGARMSEIAFFSFGDWGPG

SEQ ID NO: 170 - protein, 116 aa, Artificial Sequence
  Synthetic: LN02, MH80
QAPLPESGPGVVRPTGTLSLTCTAAYGSISRHFWGWVRQSPQGTLEWIAHMHHLGVKYVNPSLKNRVSISMDTSKNQMSLTLKTVTATDAAKYHCVRMGARMSDIYFFSFGDWGPG

SEQ ID NO: 171 - protein, 116 aa, Artificial Sequence
  Synthetic: LN02, MH81
QAPLPESGPGVVRPTGTLSLTCTAAYGSISRHFWGWVRQSPQGTLEWIAHMHHLGVKYVNPSLKNRVSISMDTSKNQMSLTLKTVTATDAAKYHCVRMGARMSDIHFFSFGDWGPG

SEQ ID NO: 172 - protein, 116 aa, Artificial Sequence
  Synthetic: LN02, MH82
QAPLPESGPGVVRPTGTLSLTCTAAYGSISRHFWGWVRQSPQGTLEWIAHMHHLGVKYVNPSLKNRVSISMDTSKNQMSLTLKTVTATDAAKYHCVRMGARMSDIAYFSFGDWGPG

SEQ ID NO: 173 - protein, 116 aa, Artificial Sequence
  Synthetic: LN02, MH83
QAPLPESGPGVVRPTGTLSLTCTAAYGSISRHFWGWVRQSPQGTLEWIAHMHHLGVKYVNPSLKNRVSISMDTSKNQMSLTLKTVTATDAAKYHCVRMGARMSDIAYYSFGDWGPG

SEQ ID NO: 174 - protein, 116 aa, Artificial Sequence
  Synthetic: LN02, MH84
QAPLPESGPGVVRPTGTLSLTCTAAYGSISRHFWGWVRQSPQGTLEWIAHMHHLGVKYVNPSLKNRVSISMDTSKNQMSLTLKTVTATDAAKYHCVRMGARMSDIAFFSYGDWGPG

SEQ ID NO: 175 - protein, 116 aa, Artificial Sequence
  Synthetic: LN02, MH85
QAPLPESGPGVVRPTGTLSLTCTAAYGSISRHFWGWVRQSPQGTLEWIAHMHHLGVKYVNPSLKNRVSISMDTSKNQMSLTLKTVTATDAAKYHCVRMGARMSDIAFFSFSDWGPG

SEQ ID NO: 176 - protein, 116 aa, Artificial Sequence
  Synthetic: LN02, MH87
QAPLPESGPGVVRPTGTLSLTCTAAYGSISRHFWGWVRQSPQGTLEWIAHMHHLGVKIVNPSLKNRVSISMDTSKNQMSLTLKTVTATDAAKYHCVRMGARMSDIAFFSFGDWGPG

SEQ ID NO: 177 - protein, 116 aa, Artificial Sequence
  Synthetic: LN02, MH89
QAPLPESGPGVVRPTGTLRLTCTAAYGSISRHFWGWVRQSPQGTLEWIAHMHHLGVKYVNPSLKNRVSISMDTSKNQMSLTLKTVTATDAAKYHCVRMGARMSDIAFFSFGDWGPG

SEQ ID NO: 178 - protein, 116 aa, Artificial Sequence
  Synthetic: LN02, MH91
QAPLPESGPGVVRPTGTLSLTCTAAYGSIYRHFWGWVRQSPQGTLEWIAHMHHLGVKYVNPSLKNRVSISMDTSKNQMSLTLKTVTATDAAKYHCVRMGARMSDIAFFSFGDWGPG

SEQ ID NO: 179 - protein, 116 aa, Artificial Sequence
  Synthetic: LN02, MH92
QAPLPESGPGVVRPTGTLSLTCTAAYGSIMRHFWGWVRQSPQGTLEWIAHMHHLGVKYVNPSLKNRVSISMDTSKNQMSLTLKTVTATDAAKYHCVRMGARMSDIAFFSFGDWGPG

SEQ ID NO: 180 - protein, 116 aa, Artificial Sequence
  Synthetic: LN02, MH93
QAPLPESGPGVVRPTGTLSLTCTAAYGSIARHFWGWVRQSPQGTLEWIAHMHHLGVKYVNPSLKNRVSISMDTSKNQMSLTLKTVTATDAAKYHCVRMGARMSDIAFFSFGDWGPG

SEQ ID NO: 181 - protein, 116 aa, Artificial Sequence
  Synthetic: LN02, MH94
QAPLPESGPGVVRPTGTLSLTCTAAYGSISKHFWGWVRQSPQGTLEWIAHMHHLGVKYVNPSLKNRVSISMDTSKNQMSLTLKTVTATDAAKYHCVRMGARMSDIAFFSFGDWGPG

SEQ ID NO: 182 - protein, 116 aa, Artificial Sequence
  Synthetic: LN02, MH95
QAPLPESGPGVVRPTGTLSLTCTAAYGSISQHFWGWVRQSPQGTLEWIAHMHHLGVKYVNPSLKNRVSISMDTSKNQMSLTLKTVTATDAAKYHCVRMGARMSDIAFFSFGDWGPG

SEQ ID NO: 183 - protein, 116 aa, Artificial Sequence
  Synthetic: LN02, MH96
QAPLPESGPGVVRPTGTLSLTCTAAYGSISYHFWGWVRQSPQGTLEWIAHMHHLGVKYVNPSLKNRVSISMDTSKNQMSLTLKTVTATDAAKYHCVRMGARMSDIAFFSFGDWGPG

SEQ ID NO: 184 - protein, 116 aa, Artificial Sequence
  Synthetic: LN02, MH97
QAPLPESGPGVVRPTGTLSLTCTAAYGSISEHFWGWVRQSPQGTLEWIAHMHHLGVKYVNPSLKNRVSISMDTSKNQMSLTLKTVTATDAAKYHCVRMGARMSDIAFFSFGDWGPG

SEQ ID NO: 185 - protein, 116 aa, Artificial Sequence
  Synthetic: LN02, MH98
QAPLPESGPGVVRPTGTLSLTCTAAYGSISRQFWGWVRQSPQGTLEWIAHMHHLGVKYVNPSLKNRVSISMDTSKNQMSLTLKTVTATDAAKYHCVRMGARMSDIAFFSFGDWGPG

SEQ ID NO: 186 - protein, 116 aa, Artificial Sequence
  Synthetic: LN02, MH99
QAPLPESGPGVVRPTGTLSLTCTAAYGSISRNFWGWVRQSPQGTLEWIAHMHHLGVKYVNPSLKNRVSISMDTSKNQMSLTLKTVTATDAAKYHCVRMGARMSDIAFFSFGDWGPG

SEQ ID NO: 187 - protein, 116 aa, Artificial Sequence
  Synthetic: LN02, MH100
QAPLPESGPGVVRPTGTLSLTCTAAYGSISRDFWGWVRQSPQGTLEWIAHMHHLGVKYVNPSLKNRVSISMDTSKNQMSLTLKTVTATDAAKYHCVRMGARMSDIAFFSFGDWGPG

SEQ ID NO: 188 - protein, 116 aa, Artificial Sequence
  Synthetic: LN02, MH101
QAPLPESGPGVVRPTGTLSLTCTAAYGSISREFWGWVRQSPQGTLEWIAHMHHLGVKYVNPSLKNRVSISMDTSKNQMSLTLKTVTATDAAKYHCVRMGARMSDIAFFSFGDWGPG

SEQ ID NO: 189 - protein, 116 aa, Artificial Sequence
  Synthetic: LN02, MH102
QAPLPESGPGVVRPTGTLSLTCTAAYGSISRAFWGWVRQSPQGTLEWIAHMHHLGVKYVNPSLKNRVSISMDTSKNQMSLTLKTVTATDAAKYHCVRMGARMSDIAFFSFGDWGPG

SEQ ID NO: 190 - protein, 116 aa, Artificial Sequence
  Synthetic: LN02, MH103
QAPLPESGPGVVRPTGTLSLTCTAAYGSISRTFWGWVRQSPQGTLEWIAHMHHLGVKYVNPSLKNRVSISMDTSKNQMSLTLKTVTATDAAKYHCVRMGARMSDIAFFSFGDWGPG

SEQ ID NO: 191 - protein, 116 aa, Artificial Sequence
  Synthetic: LN02, MH104
QAPLPESGPGVVRPTGTLSLTCTAAYGSISRSFWGWVRQSPQGTLEWIAHMHHLGVKYVNPSLKNRVSISMDTSKNQMSLTLKTVTATDAAKYHCVRMGARMSDIAFFSFGDWGPG

SEQ ID NO: 192 - protein, 116 aa, Artificial Sequence
  Synthetic: LN02, MH105
QAPLPESGPGVVRPTGTLSLTCTAAYGSISRHFWGWVRQSPQGTLEWIAHQHHLGVKYVNPSLKNRVSISMDTSKNQMSLTLKTVTATDAAKYHCVRMGARMSDIAFFSFGDWGPG

SEQ ID NO: 193 - protein, 116 aa, Artificial Sequence
  Synthetic: LN02, MH106
QAPLPESGPGVVRPTGTLSLTCTAAYGSISRHFWGWVRQSPQGTLEWIAHTHHLGVKYVNPSLKNRVSISMDTSKNQMSLTLKTVTATDAAKYHCVRMGARMSDIAFFSFGDWGPG

SEQ ID NO: 194 - protein, 116 aa, Artificial Sequence
  Synthetic: LN02, MH107
QAPLPESGPGVVRPTGTLSLTCTAAYGSISRHFWGWVRQSPQGTLEWIAHFHHLGVKYVNPSLKNRVSISMDTSKNQMSLTLKTVTATDAAKYHCVRMGARMSDIAFFSFGDWGPG

SEQ ID NO: 195 - protein, 116 aa, Artificial Sequence
  Synthetic: LN02, MH108
QAPLPESGPGVVRPTGTLSLTCTAAYGSISRHFWGWVRQSPQGTLEWIAHRHHLGVKYVNPSLKNRVSISMDTSKNQMSLTLKTVTATDAAKYHCVRMGARMSDIAFFSFGDWGPG

SEQ ID NO: 196 - protein, 116 aa, Artificial Sequence
  Synthetic: LN02, MH109
QAPLPESGPGVVRPTGTLSLTCTAAYGSISRHFWGWVRQSPQGTLEWIAHMQHLGVKYVNPSLKNRVSISMDTSKNQMSLTLKTVTATDAAKYHCVRMGARMSDIAFFSFGDWGPG

SEQ ID NO: 197 - protein, 116 aa, Artificial Sequence
  Synthetic: LN02, MH110
QAPLPESGPGVVRPTGTLSLTCTAAYGSISRHFWGWVRQSPQGTLEWIAHMTHLGVKYVNPSLKNRVSISMDTSKNQMSLTLKTVTATDAAKYHCVRMGARMSDIAFFSFGDWGPG

SEQ ID NO: 198 - protein, 116 aa, Artificial Sequence
  Synthetic: LN02, MH111
QAPLPESGPGVVRPTGTLSLTCTAAYGSISRHFWGWVRQSPQGTLEWIAHMHQLGVKYVNPSLKNRVSISMDTSKNQMSLTLKTVTATDAAKYHCVRMGARMSDIAFFSFGDWGPG

SEQ ID NO: 199 - protein, 116 aa, Artificial Sequence
  Synthetic: LN02, MH112
QAPLPESGPGVVRPTGTLSLTCTAAYGSISRHFWGWVRQSPQGTLEWIAHMHTLGVKYVNPSLKNRVSISMDTSKNQMSLTLKTVTATDAAKYHCVRMGARMSDIAFFSFGDWGPG

SEQ ID NO: 200 - protein, 116 aa, Artificial Sequence
  Synthetic: LN02, MH113
QAPLPESGPGVVRPTGTLSLTCTAAYGSISRHFWGWVRQSPQGTLEWIAHMHHRGVKYVNPSLKNRVSISMDTSKNQMSLTLKTVTATDAAKYHCVRMGARMSDIAFFSFGDWGPG

SEQ ID NO: 201 - protein, 116 aa, Artificial Sequence
  Synthetic: LN02, MH114
QAPLPESGPGVVRPTGTLSLTCTAAYGSISRHFWGWVRQSPQGTLEWIAHMHHEGVKYVNPSLKNRVSISMDTSKNQMSLTLKTVTATDAAKYHCVRMGARMSDIAFFSFGDWGPG

SEQ ID NO: 202 - protein, 116 aa, Artificial Sequence
  Synthetic: LN02, MH115
QAPLPESGPGVVRPTGTLSLTCTAAYGSISRHFWGWVRQSPQGTLEWIAHMHHYGVKYVNPSLKNRVSISMDTSKNQMSLTLKTVTATDAAKYHCVRMGARMSDIAFFSFGDWGPG

SEQ ID NO: 203 - protein, 116 aa, Artificial Sequence
  Synthetic: LN02, MH116
QAPLPESGPGVVRPTGTLSLTCTAAYGSISRHFWGWVRQSPQGTLEWIAHMHHVGVKYVNPSLKNRVSISMDTSKNQMSLTLKTVTATDAAKYHCVRMGARMSDIAFFSFGDWGPG

SEQ ID NO: 204 - protein, 116 aa, Artificial Sequence
  Synthetic: LN02, MH117
QAPLPESGPGVVRPTGTLSLTCTAAYGSISRHFWGWVRQSPQGTLEWIAHMHHAGVKYVNPSLKNRVSISMDTSKNQMSLTLKTVTATDAAKYHCVRMGARMSDIAFFSFGDWGPG

SEQ ID NO: 205 - protein, 116 aa, Artificial Sequence
  Synthetic: LN02, MH118
QAPLPESGPGVVRPTGTLSLTCTAAYGSISRHFWGWVRQSPQGTLEWIAHMHHLGTKYVNPSLKNRVSISMDTSKNQMSLTLKTVTATDAAKYHCVRMGARMSDIAFFSFGDWGPG

SEQ ID NO: 206 - protein, 116 aa, Artificial Sequence
  Synthetic: LN02, MH119
QAPLPESGPGVVRPTGTLSLTCTAAYGSISRHFWGWVRQSPQGTLEWIAHMHHLGFKYVNPSLKNRVSISMDTSKNQMSLTLKTVTATDAAKYHCVRMGARMSDIAFFSFGDWGPG

SEQ ID NO: 207 - protein, 116 aa, Artificial Sequence
  Synthetic: LN02, MH120
QAPLPESGPGVVRPTGTLSLTCTAAYGSISRHFWGWVRQSPQGTLEWIAHMHHLGYKYVNPSLKNRVSISMDTSKNQMSLTLKTVTATDAAKYHCVRMGARMSDIAFFSFGDWGPG

SEQ ID NO: 208 - protein, 116 aa, Artificial Sequence
  Synthetic: LN02, MH121
QAPLPESGPGVVRPTGTLSLTCTAAYGSISRHFWGWVRQSPQGTLEWIAHMHHLGHKYVNPSLKNRVSISMDTSKNQMSLTLKTVTATDAAKYHCVRMGARMSDIAFFSFGDWGPG

SEQ ID NO: 209 - protein, 116 aa, Artificial Sequence
  Synthetic: LN02, MH122
QAPLPESGPGVVRPTGTLSLTCTAAYGSISRHFWGWVRQSPQGTLEWIAHMHHLGVEYVNPSLKNRVSISMDTSKNQMSLTLKTVTATDAAKYHCVRMGARMSDIAFFSFGDWGPG

SEQ ID NO: 210 - protein, 116 aa, Artificial Sequence
  Synthetic: LN02, MH123
QAPLPESGPGVVRPTGTLSLTCTAAYGSISRHFWGWVRQSPQGTLEWIAHMHHLGVRYVNPSLKNRVSISMDTSKNQMSLTLKTVTATDAAKYHCVRMGARMSDIAFFSFGDWGPG

SEQ ID NO: 211 - protein, 116 aa, Artificial Sequence; identical to SEQ ID NO: 109
  Synthetic: LN02, MH124

SEQ ID NO: 212 - protein, 116 aa, Artificial Sequence
  Synthetic: LN02, MH125
QAPLPESGPGVVRPTGTLSLTCTAAYGSISRHFWGWVRQSPQGTLEWIAHMHHLGVKYMNPSLKNRVSISMDTSKNQMSLTLKTVTATDAAKYHCVRMGARMSDIAFFSFGDWGPG

SEQ ID NO: 213 - protein, 116 aa, Artificial Sequence
  Synthetic: LN02, MH126
QAPLPESGPGVVRPTGTLSLTCTAAYGSISRHFWGWVRQSPQGTLEWIAHMHHLGVKYTNPSLKNRVSISMDTSKNQMSLTLKTVTATDAAKYHCVRMGARMSDIAFFSFGDWGPG

SEQ ID NO: 214 - protein, 116 aa, Artificial Sequence
  Synthetic: LN02, MH127
QAPLPESGPGVVRPTGTLSLTCTAAYGSISRHFWGWVRQSPQGTLEWIAHMHHLGVKYANPSLKNRVSISMDTSKNQMSLTLKTVTATDAAKYHCVRMGARMSDIAFFSFGDWGPG

SEQ ID NO: 215 - protein, 116 aa, Artificial Sequence
  Synthetic: LN02, MH128
QAPLPESGPGVVRPTGTLSLTCTAAYGSISRHFWGWVRQSPQGTLEWIAHMHHLGVKYVFPSLKNRVSISMDTSKNQMSLTLKTVTATDAAKYHCVRMGARMSDIAFFSFGDWGPG

SEQ ID NO: 216 - protein, 116 aa, Artificial Sequence
  Synthetic: LN02, MH129
QAPLPESGPGVVRPTGTLSLTCTAAYGSISRHFWGWVRQSPQGTLEWIAHMHHLGVKYVNGSLKNRVSISMDTSKNQMSLTLKTVTATDAAKYHCVRMGARMSDIAFFSFGDWGPG

SEQ ID NO: 217 - protein, 116 aa, Artificial Sequence
  Synthetic: LN02, MH130
QAPLPESGPGVVRPTGTLSLTCTAAYGSISRHFWGWVRQSPQGTLEWIAHMHHLGVKYVNPTLKNRVSISMDTSKNQMSLTLKTVTATDAAKYHCVRMGARMSDIAFFSFGDWGPG

SEQ ID NO: 218 - protein, 116 aa, Artificial Sequence
  Synthetic: LN02, MH131
QAPLPESGPGVVRPTGTLSLTCTAAYGSISRHFWGWVRQSPQGTLEWIAHMHHLGVKYVNPSVKNRVSISMDTSKNQMSLTLKTVTATDAAKYHCVRMGARMSDIAFFSFGDWGPG

SEQ ID NO: 219 - protein, 116 aa, Artificial Sequence
  Synthetic: LN02, MH132
QAPLPESGPGVVRPTGTLSLTCTAAYGSISRHFWGWVRQSPQGTLEWIAHMHHLGVKYVNPSLDNRVSISMDTSKNQMSLTLKTVTATDAAKYHCVRMGARMSDIAFFSFGDWGPG

SEQ ID NO: 220 - protein, 116 aa, Artificial Sequence
  Synthetic: LN02, MH133
QAPLPESGPGVVRPTGTLSLTCTAAYGSISRHFWGWVRQSPQGTLEWIAHMHHLGVKYVNPSLENRVSISMDTSKNQMSLTLKTVTATDAAKYHCVRMGARMSDIAFFSFGDWGPG

SEQ ID NO: 221 - protein, 116 aa, Artificial Sequence
  Synthetic: LN02, MH134
QAPLPESGPGVVRPTGTLSLTCTAAYGSISRHFWGWVRQSPQGTLEWIAHMHHLGVKYVNPSLHNRVSISMDTSKNQMSLTLKTVTATDAAKYHCVRMGARMSDIAFFSFGDWGPG

SEQ ID NO: 222 - protein, 116 aa, Artificial Sequence
  Synthetic: LN02, MH135
QAPLPESGPGVVRPTGTLSLTCTAAYGSISRHFWGWVRQSPQGTLEWIAHMHHLGVKYVNPSLKNRVSISMDTSKNQMSLTLKTVTATDAAKYHCVRMGSRMSDIAFFSFGDWGPG

SEQ ID NO: 223 - protein, 116 aa, Artificial Sequence
  Synthetic: LN02, MH136
QAPLPESGPGVVRPTGTLSLTCTAAYGSISRHFWGWVRQSPQGTLEWIAHMHHLGVKYVNPSLKNRVSISMDTSKNQMSLTLKTVTATDAAKYHCVRMGYRMSDIAFFSFGDWGPG

SEQ ID NO: 224 - protein, 116 aa, Artificial Sequence
  Synthetic: LN02, MH137
QAPLPESGPGVVRPTGTLSLTCTAAYGSISRHFWGWVRQSPQGTLEWIAHMHHLGVKYVNPSLKNRVSISMDTSKNQMSLTLKTVTATDAAKYHCVRMGARVSDIAFFSFGDWGPG

SEQ ID NO: 225 - protein, 116 aa, Artificial Sequence
  Synthetic: LN02, MH138
QAPLPESGPGVVRPTGTLSLTCTAAYGSISRHFWGWVRQSPQGTLEWIAHMHHLGVKYVNPSLKNRVSISMDTSKNQMSLTLKTVTATDAAKYHCVRMGARYSDIAFFSFGDWGPG

SEQ ID NO: 226 - protein, 116 aa, Artificial Sequence
  Synthetic: LN02, MH139
QAPLPESGPGVVRPTGTLSLTCTAAYGSISRHFWGWVRQSPQGTLEWIAHMHHLGVKYVNPSLKNRVSISMDTSKNQMSLTLKTVTATDAAKYHCVRMGARMSRIAFFSFGDWGPG

SEQ ID NO: 227 - protein, 116 aa, Artificial Sequence
  Synthetic: LN02, MH141
QAPLPESGPGVVRPTGTLSLTCTAAYGSISRHFWGWVRQSPQGTLEWIAHMHHLGVKYVNPSLKNRVSISMDTSKNQMSLTLKTVTATDAAKYHCVRMGARMSDVAFFSFGDWGPG

SEQ ID NO: 228 - protein, 116 aa, Artificial Sequence
  Synthetic: LN02, MH142
QAPLPESGPGVVRPTGTLSLTCTAAYGSISRHFWGWVRQSPQGTLEWIAHMHHLGVKYVNPSLKNRVSISMDTSKNQMSLTLKTVTATDAAKYHCVRMGARMSDYAFFSFGDWGPG

SEQ ID NO: 229 - protein, 116 aa, Artificial Sequence
  Synthetic: LN02, MH143
QAPLPESGPGVVRPTGTLSLTCTAAYGSISRHFWGWVRQSPQGTLEWIAHMHHLGVKYVNPSLKNRVSISMDTSKNQMSLTLKTVTATDAAKYHCVRMGARMSDIAHFSFGDWGPG

SEQ ID NO: 230 - protein, 116 aa, Artificial Sequence
  Synthetic: LN02, MH144
QAPLPESGPGVVRPTGTLSLTCTAAYGSISRHFWGWVRQSPQGTLEWIAHMHHLGVKYVNPSLKNRVSISMDTSKNQMSLTLKTVTATDAAKYHCVRMGARMSDIAMFSFGDWGPG

SEQ ID NO: 231 - protein, 116 aa, Artificial Sequence
  Synthetic: LN02, MH145
QAPLPESGPGVVRPTGTLSLTCTAAYGSISRHFWGWVRQSPQGTLEWIAHMHHLGVKYVNPSLKNRVSISMDTSKNQMSLTLKTVTATDAAKYHCVRMGARMSDIAFFTFGDWGPG

SEQ ID NO: 232 - protein, 116 aa, Artificial Sequence
  Synthetic: LN02, MH146
QAPLPESGPGVVRPTGTLSLTCTAAYGSISRHFWGWVRQSPQGTLEWIAHMHHLGVKYVNPSLKNRVSISMDTSKNQMSLTLKTVTATDAAKYHCVRMGARMSDIAFFYFGDWGPG

SEQ ID NO: 233 - protein, 116 aa, Artificial Sequence
  Synthetic: LN02, MH147
QAPLPESGPGVVRPTGTLSLTCTAAYGSISRHFWGWVRQSPQGTLEWIAHMHHLGVKYVNPSLKNRVSISMDTSKNQMSLTLKTVTATDAAKYHCVRMGARMSDIAFFSFGEWGPG

SEQ ID NO: 234 - protein, 124 aa, Artificial Sequence
  Synthetic: LN02_VH
QAPLPESGPGVVRPTGTLSLTCTAAYGSISRHFWGWVRQSPQGTLEWIAHMHHLGVKYVNPSLKNRVSISMDTSKNQMSLTLKTVTATDAAKYHCVRMGARMSDIAFFSFGDWGPGSLVTVSSA

SEQ ID NO: 235 - protein, 109 aa, Artificial Sequence; identical to SEQ ID NO: 1
  Synthetic: LN02_ VL

SEQ ID NO: 236 - protein, 116 aa, Artificial Sequence
  Synthetic: IGHV4-4*02-GL
QVQLQESGPGLVKPSGTLSLTCAVSGGSISSSNWWWVRQPPGKGLEWIGEIYHSGSTNYNPSLKSRVTISVDKSKNQFSLKLSSVTAADTAVYYCARSSHDAFDIWGQGTMVTVSS

SEQ ID NO: 237 - protein, 109 aa, Artificial Sequence
  Synthetic: IGLV3-21*01_GL
SYVLTQPPSVSVAPGQTARITCGGNNIGSKSVHWYQQKPGQAPVLVVYDDSDRPSGIPERFSGSNSGNTATLTISRVEAGDEADYYCQVWDSSSDHPVFGGGTKLTVLG

SEQ ID NO: 238 - protein, 844 aa, Human immunodeficiency virus 1
  misc_feature: CAP45 pseudovirus
MGVRGILGNWPQWWIWSILGFWMLIICRVMGNLWVTVYYGVPVWKEAKATLFCASDARAYEKEVHNVWATHACVPTDPNPQEIYLGNVTENFNMWKNDMVDQMHEDIISLWDQSLKPCVKLTPLCVTLRCTNATINGSLTEEVKNCSFNITTELRDKKQKAYALFYRPDVVPLNKNSPSGNSSEYILINCNTSTITQACPKVSFDPIPIHYCAPAGYAILKCNNKTFNGTGPCNNVSTVQCTHGIKPVVSTQLLLNGSLAEEDIIIKSENLTNNIKTIIVHLNKSVEIVCRRPNNNTRKSIRIGPGQAFYATNDIIGDIRQAHCNINNSTWNRTLEQIKKKLREHFLNRTIEFESPSGGDLEVTTHSFNCGGEFFYCNTTRLFKWSSNVTNDTITIPCRIKQFINMWQGVGRAMYAPPIEGNITCNSSITGLLLTRDGGKTDRNDTEIFRPGGGNMKDNWRNELYKYKVVEIKPLGVAPTEARRRVVEREKRAVGIGAVLLGFLGAAGSTMGAASITLTVQARQLLSGIVQQQSNLLRAIEAQQHMLQLTVWGIKQLQTRVLAIERYLKDQQLLGLWGCSGKLICTTNVPWNSSWSNKSQTDIWDNMTWIQWDREISNYSNTIYKLLEDSQNQQEQNEKDLLALDSWNNLWNWFNITNWLWYIKIFIMIIGGLIGLRIILGVLSIVKRVRQGYSPLSFQTLTPNPRGLDRLGRIEEEGGEQDKDRSIRLVNGFLALAWEDLRSLCLFSYHRLRDFILIAVRAVELLGSSSLRGLQRGWEALKYLGSLLQYWGLELKKSAINLLDTVAIAVAEGTDRIIELIQRICRAIRNIPRRIRQGFEAALL

SEQ ID NO: 239 - protein, 856 aa, Artificial Sequence
  Synthetic: HXB2 Env sequence
MRVKEKYQHLWRWGWRWGTMLLGMLMICSATEKLWVTVYYGVPVWKEATTTLFCASDAKAYDTEVHNVWATHACVPTDPNPQEVVLVNVTENFNMWKNDMVEQMHEDIISLWDQSLKPCVKLTPLCVSLKCTDLKNDTNTNSSSGRMIMEKGEIKNCSFNISTSIRGKVQKEYAFFYKLDIIPIDNDTTSYTLTSCNTSVITQACPKVSFEPIPIHYCAPAGFAILKCNNKTFNGTGPCTNVSTVQCTHGIRPVVSTQLLLNGSLAEEEVVIRSVNFTDNAKTIIVQLNTSVEINCTRPNNNTRKKIRIQRGPGRAFVTIGKIGNMRQAHCNISRAKWNATLKQIASKLREQFGNNKTIIFKQSSGGDPEIVTHSFNCGGEFFYCNSTQLFNSTWFNSTWSTEGSNNTEGSDTITLPCRIKQFINMWQEVGKAMYAPPISGQIRCSSNITGLLLTRDGGNNNNGSEIFRPGGGDMRDNWRSELYKYKVVKIEPLGVAPTKAKRRVVQREKRAVGIGALFLGFLGAAGSTMGAASMTLTVQARQLLSGIVQQQNNLLRAIEAQQHLLQLTVWGIKQLQARILAVERYLKDQQLLGIWGCSGKLICTTAVPWNASWSNKSLEQIWNHTTWMEWDREINNYTSLIHSLIEESQNQQEKNEQELLELDKWASLWNWFNITNWLWYIKLFIMIVGGLVGLRIVFAVLSVVNRVRQGYSPLSFQTHLPIPRGPDRPEGIEEEGGERDRDRSIRLVNGSLALIWDDLRSLCLFSYHRLRDLLLIVTRIVELLGRRGWEALKYWWNLLQYWSQELKNSAVSLLNATAIAVAEGTDRVIEVVQGACRAIRHIPRRIRQGLERILL

SEQ ID NO: 240 - protein, 116 aa, Artificial Sequence; identical to SEQ ID NO: 93
  Synthetic: >LN02-HC_TRANSLATIoN_FRAME_1_R

SEQ ID NO: 241 - protein, 116 aa, Artificial Sequence; identical to SEQ ID NO: 93
  Synthetic: LN02_HEAVY CHAIN NEW DoRA

SEQ ID NO: 242 - protein, 116 aa, Artificial Sequence
  Synthetic: AB-004223-1*-VH
QAPLPESGPGVVRPTGTLSLTCTAAYGSISRHFWGWVRQSPQGTLEWIAHMHHLGVKIVNPSLKNRVSISMDTSKNQMSLTLKTVTATDTAKYHCVRMGARMSDIAFFSFGDWGPG

SEQ ID NO: 243 - protein, 116 aa, Artificial Sequence
  Synthetic: AB-004223-3_460_VH
QAPLPESGPGLVRPAETLSLTCTATYGSISRHFWGWVRQSPQGALEWIAHMHHLGVKYVNPSLKGRVSISMDTSKNQMSLTLETVTATDTAKYHCARMGARMSDIAFFSFGAWGPG

SEQ ID NO: 244 - protein, 116 aa, Artificial Sequence
  Synthetic: AB-004223-4_461_VH
QAPLPESGPGLVRPGGTLSLTCTAAYGSISRHFWGWVRQAPRGGLEWVAHMHHLDMKEVNPSLKSRLTISMDTSRNQMSLTLRSVTAADTAKYYCVRMGAMRSDIQIFSFDAWGPG

SEQ ID NO: 245 - protein, 116 aa, Artificial Sequence
  Synthetic: AB-004223-2-_463_VH
QAPLPESGPGLVRPGGTLSLTCTAAYGSISRHFWGWVRQAPRGGLEWVAHMHHLDMKEVNPSLKSRLTISMDTSQNQMSLTLRSVTAADTAKYYCVRMGAMRSDIQIFSFDAWGPG

SEQ ID NO: 246 - protein, 116 aa, Artificial Sequence
  Synthetic: AB-004223-5_462_VH
QWPLPESGPGLVKPSETLSLTCGVSGGSISRHYWGWIRQSPKGGLEWIAHMHHIGEKKMSPSFKSRCTFSMDTSKNQMFLSLKSVTAADTATYFCVRVGTLMADIPVIWFSHWGPG

SEQ ID NO: 247 - protein, 98 aa, Artificial Sequence; identical to SEQ ID NO: 94
  Synthetic: IGHV4-4*02_GERMLINE VH

SEQ ID NO: 248 - protein, 116 aa, Artificial Sequence; identical to SEQ ID NO: 93
  Synthetic: LN02_AB_VH

SEQ ID NO: 249 - protein, 116 aa, Artificial Sequence; identical to SEQ ID NO: 95
  Synthetic: LN02_AB_H01

SEQ ID NO: 250 - protein, 116 aa, Artificial Sequence; identical to SEQ ID NO: 96
  Synthetic: LN02_AB_H02

SEQ ID NO: 251 - protein, 116 aa, Artificial Sequence; identical to SEQ ID NO: 97
  Synthetic: LN02_AB_H03

SEQ ID NO: 252 - protein, 116 aa, Artificial Sequence; identical to SEQ ID NO: 98
  Synthetic: LN02_AB_H04

SEQ ID NO: 253 - protein, 116 aa, Artificial Sequence; identical to SEQ ID NO: 99
  Synthetic: LN02_AB_H05

SEQ ID NO: 254 - protein, 116 aa, Artificial Sequence; identical to SEQ ID NO: 100
  Synthetic: LN02_AB_H06

SEQ ID NO: 255 - protein, 116 aa, Artificial Sequence; identical to SEQ ID NO: 101
  Synthetic: LN02_AB_H07

SEQ ID NO: 256 - protein, 116 aa, Artificial Sequence; identical to SEQ ID NO: 102
  Synthetic: LN02_AB_H08

SEQ ID NO: 257 - protein, 116 aa, Artificial Sequence; identical to SEQ ID NO: 103
  Synthetic: LN02_AB_H09

SEQ ID NO: 258 - protein, 116 aa, Artificial Sequence; identical to SEQ ID NO: 104
  Synthetic: LN02_AB_H10

SEQ ID NO: 259 - protein, 116 aa, Artificial Sequence; identical to SEQ ID NO: 105
  Synthetic: LN02_AB_H11

SEQ ID NO: 260 - protein, 116 aa, Artificial Sequence; identical to SEQ ID NO: 106
  Synthetic: LN02_AB_H12

SEQ ID NO: 261 - protein, 116 aa, Artificial Sequence; identical to SEQ ID NO: 107
  Synthetic: LN02_AB_H13

SEQ ID NO: 262 - protein, 116 aa, Artificial Sequence; identical to SEQ ID NO: 108
  Synthetic: LN02_AB_H14

SEQ ID NO: 263 - protein, 116 aa, Artificial Sequence; identical to SEQ ID NO: 109
  Synthetic: LN02_AB_H15

SEQ ID NO: 264 - protein, 116 aa, Artificial Sequence; identical to SEQ ID NO: 110
  Synthetic: LN02_AB_H16

SEQ ID NO: 265 - protein, 116 aa, Artificial Sequence; identical to SEQ ID NO: 111
  Synthetic: LN02_AB_H17

SEQ ID NO: 266 - protein, 116 aa, Artificial Sequence; identical to SEQ ID NO: 112
  Synthetic: LN02_AB_H18

SEQ ID NO: 267 - protein, 116 aa, Artificial Sequence; identical to SEQ ID NO: 113
  Synthetic: LN02_AB_H19

SEQ ID NO: 268 - protein, 116 aa, Artificial Sequence; identical to SEQ ID NO: 114
  Synthetic: LN02_AB_H20

SEQ ID NO: 269 - protein, 116 aa, Artificial Sequence; identical to SEQ ID NO: 115
  Synthetic: LN02_AB_H21

SEQ ID NO: 270 - protein, 116 aa, Artificial Sequence; identical to SEQ ID NO: 116
  Synthetic: LN02_AB_H22

SEQ ID NO: 271 - protein, 116 aa, Artificial Sequence; identical to SEQ ID NO: 117
  Synthetic: LN02_AB_H23

SEQ ID NO: 272 - protein, 116 aa, Artificial Sequence; identical to SEQ ID NO: 118
  Synthetic: LN02_AB_H24

SEQ ID NO: 273 - protein, 116 aa, Artificial Sequence; identical to SEQ ID NO: 119
  Synthetic: LN02_AB_H25

SEQ ID NO: 274 - protein, 116 aa, Artificial Sequence; identical to SEQ ID NO: 120
  Synthetic: LN02_AB_H26

SEQ ID NO: 275 - protein, 116 aa, Artificial Sequence; identical to SEQ ID NO: 121
  Synthetic: LN02_AB_H27

SEQ ID NO: 276 - protein, 116 aa, Artificial Sequence; identical to SEQ ID NO: 122
  Synthetic: LN02_AB_H28

SEQ ID NO: 277 - protein, 116 aa, Artificial Sequence; identical to SEQ ID NO: 123
  Synthetic: LN02_AB_H29

SEQ ID NO: 278 - protein, 116 aa, Artificial Sequence; identical to SEQ ID NO: 124
  Synthetic: LN02_AB_H30

SEQ ID NO: 279 - protein, 116 aa, Artificial Sequence; identical to SEQ ID NO: 125
  Synthetic: LN02_AB_H31

SEQ ID NO: 280 - protein, 116 aa, Artificial Sequence; identical to SEQ ID NO: 126
  Synthetic: LN02_AB_H32

SEQ ID NO: 281 - protein, 116 aa, Artificial Sequence; identical to SEQ ID NO: 127
  Synthetic: LN02_AB_H33

SEQ ID NO: 282 - protein, 116 aa, Artificial Sequence; identical to SEQ ID NO: 128
  Synthetic: LN02_AB_H34

SEQ ID NO: 283 - protein, 116 aa, Artificial Sequence; identical to SEQ ID NO: 129
  Synthetic: LN02_AB_H35

SEQ ID NO: 284 - protein, 116 aa, Artificial Sequence; identical to SEQ ID NO: 130
  Synthetic: LN02_AB_H36

SEQ ID NO: 285 - protein, 116 aa, Artificial Sequence; identical to SEQ ID NO: 131
  Synthetic: LN02_AB_H37

SEQ ID NO: 286 - protein, 116 aa, Artificial Sequence; identical to SEQ ID NO: 132
  Synthetic: LN02_AB_H38

SEQ ID NO: 287 - protein, 116 aa, Artificial Sequence; identical to SEQ ID NO: 133
  Synthetic: LN02_AB_H39

SEQ ID NO: 288 - protein, 116 aa, Artificial Sequence; identical to SEQ ID NO: 134
  Synthetic: LN02_AB_H40

SEQ ID NO: 289 - protein, 116 aa, Artificial Sequence; identical to SEQ ID NO: 135
  Synthetic: LN02_AB_H41

SEQ ID NO: 290 - protein, 116 aa, Artificial Sequence
  Synthetic: LN02_AB_H42
QAPLPESGPGVVRPTGTLYLTCTAAYGSISRHFWGWVRQSPQGTLEWIAHMHHLGVKYVNPSLKNRVSISMDTSKNQMSLTLKTVTATDAAKYHCVRMGARMSDIAFFSFGDWGPG

SEQ ID NO: 291 - protein, 116 aa, Artificial Sequence; identical to SEQ ID NO: 136
  Synthetic: LN02_AB_H43

SEQ ID NO: 292 - protein, 116 aa, Artificial Sequence; identical to SEQ ID NO: 137
  Synthetic: LN02_AB_H44

SEQ ID NO: 293 - protein, 116 aa, Artificial Sequence; identical to SEQ ID NO: 138
  Synthetic: LN02_AB_H45

SEQ ID NO: 294 - protein, 116 aa, Artificial Sequence; identical to SEQ ID NO: 139
  Synthetic: LN02_AB_H46

SEQ ID NO: 295 - protein, 116 aa, Artificial Sequence; identical to SEQ ID NO: 140
  Synthetic: LN02_AB_H47

SEQ ID NO: 296 - protein, 116 aa, Artificial Sequence; identical to SEQ ID NO: 141
  Synthetic: LN02_AB_H48

SEQ ID NO: 297 - protein, 116 aa, Artificial Sequence; identical to SEQ ID NO: 142
  Synthetic: LN02_AB_H49

SEQ ID NO: 298 - protein, 116 aa, Artificial Sequence; identical to SEQ ID NO: 143
  Synthetic: LN02_AB_H50

SEQ ID NO: 299 - protein, 116 aa, Artificial Sequence; identical to SEQ ID NO: 144
  Synthetic: LN02_AB_H51

SEQ ID NO: 300 - protein, 116 aa, Artificial Sequence; identical to SEQ ID NO: 145
  Synthetic: LN02_AB_H52

SEQ ID NO: 301 - protein, 116 aa, Artificial Sequence; identical to SEQ ID NO: 146
  Synthetic: LN02_AB_H53

SEQ ID NO: 302 - protein, 116 aa, Artificial Sequence; identical to SEQ ID NO: 147
  Synthetic: LN02_AB_H54

SEQ ID NO: 303 - protein, 116 aa, Artificial Sequence; identical to SEQ ID NO: 148
  Synthetic: LN02_AB_H55

SEQ ID NO: 304 - protein, 116 aa, Artificial Sequence; identical to SEQ ID NO: 149
  Synthetic: LN02_AB_H56

SEQ ID NO: 305 - protein, 116 aa, Artificial Sequence; identical to SEQ ID NO: 150
  Synthetic: LN02_AB_H57

SEQ ID NO: 306 - protein, 116 aa, Artificial Sequence
  Synthetic: LN02_AB_H58
QAPLPESGPGVVRPTGTLSLTCTAAYGSISRHFWGWVRQSPQGTLEWIAHMHYLGVKYVNPSLKNRVSISMDTSKNQMSLTLKTVTATDAAKYHCVRMGARMSDIAFFSFGDWGPG

SEQ ID NO: 307 - protein, 116 aa, Artificial Sequence; identical to SEQ ID NO: 151
  Synthetic: LN02_AB_H59

SEQ ID NO: 308 - protein, 116 aa, Artificial Sequence; identical to SEQ ID NO: 152
  Synthetic: LN02_AB_H60

SEQ ID NO: 309 - protein, 116 aa, Artificial Sequence; identical to SEQ ID NO: 153
  Synthetic: LN02_AB_H61

SEQ ID NO: 310 - protein, 116 aa, Artificial Sequence; identical to SEQ ID NO: 154
  Synthetic: LN02_AB_H62

SEQ ID NO: 311 - protein, 116 aa, Artificial Sequence; identical to SEQ ID NO: 155
  Synthetic: LN02_AB_H63

SEQ ID NO: 312 - protein, 116 aa, Artificial Sequence; identical to SEQ ID NO: 156
  Synthetic: LN02_AB_H64

SEQ ID NO: 313 - protein, 116 aa, Artificial Sequence; identical to SEQ ID NO: 157
  Synthetic: LN02_AB_H65

SEQ ID NO: 314 - protein, 116 aa, Artificial Sequence
  Synthetic: LN02_AB_H66
QAPLPESGPGVVRPTGTLSLTCTAAYGSISRHFWGWVRQSPQGTLEWIAHMHHLGVKYVNPSLKQRVSISMDTSKNQMSLTLKTVTATDAAKYHCVRMGARMSDIAFFSFGDWGPG

SEQ ID NO: 315 - protein, 116 aa, Artificial Sequence; identical to SEQ ID NO: 158
  Synthetic: LN02_AB_H67

SEQ ID NO: 316 - protein, 116 aa, Artificial Sequence; identical to SEQ ID NO: 120
  Synthetic: LN02_AB_H68

SEQ ID NO: 317 - protein, 116 aa, Artificial Sequence; identical to SEQ ID NO: 160
  Synthetic: LN02_AB_H69

SEQ ID NO: 318 - protein, 116 aa, Artificial Sequence; identical to SEQ ID NO: 161
  Synthetic: LN02_AB_H70

SEQ ID NO: 319 - protein, 116 aa, Artificial Sequence; identical to SEQ ID NO: 162
  Synthetic: LN02_AB_H72

SEQ ID NO: 320 - protein, 116 aa, Artificial Sequence; identical to SEQ ID NO: 163
  Synthetic: LN02_AB_H73

SEQ ID NO: 321 - protein, 116 aa, Artificial Sequence; identical to SEQ ID NO: 164
  Synthetic: LN02_AB_H74

SEQ ID NO: 322 - protein, 116 aa, Artificial Sequence; identical to SEQ ID NO: 165
  Synthetic: LN02_AB_H75

SEQ ID NO: 323 - protein, 116 aa, Artificial Sequence; identical to SEQ ID NO: 166
  Synthetic: LN02_AB_H76

SEQ ID NO: 324 - protein, 116 aa, Artificial Sequence; identical to SEQ ID NO: 167
  Synthetic: LN02_AB_H77

SEQ ID NO: 325 - protein, 116 aa, Artificial Sequence; identical to SEQ ID NO: 168
  Synthetic: LN02_AB_H78

SEQ ID NO: 326 - protein, 116 aa, Artificial Sequence; identical to SEQ ID NO: 169
  Synthetic: LN02_AB_H79

SEQ ID NO: 327 - protein, 116 aa, Artificial Sequence; identical to SEQ ID NO: 170
  Synthetic: LN02_AB_H80

SEQ ID NO: 328 - protein, 116 aa, Artificial Sequence; identical to SEQ ID NO: 171
  Synthetic: LN02_AB_H81

SEQ ID NO: 329 - protein, 116 aa, Artificial Sequence; identical to SEQ ID NO: 172
  Synthetic: LN02_AB_H82

SEQ ID NO: 330 - protein, 116 aa, Artificial Sequence; identical to SEQ ID NO: 173
  Synthetic: LN02_AB_H83

SEQ ID NO: 331 - protein, 116 aa, Artificial Sequence; identical to SEQ ID NO: 174
  Synthetic: LN02_AB_H84

SEQ ID NO: 332 - protein, 116 aa, Artificial Sequence; identical to SEQ ID NO: 175
  Synthetic: LN02_AB_H85

SEQ ID NO: 333 - protein, 116 aa, Artificial Sequence
  Synthetic: LN02_AB_H86
QAPLPESGPGVVRPTGTLSLTCTAAYGSISRHFWGWVRQSPQGTLEWIAHMHHLGVKYVNPSLKNRVSISMDTSKNQMSLTLKTVTATDAAKYHCVRMGARMSDIAFFSFGAWGPG

SEQ ID NO: 334 - protein, 116 aa, Artificial Sequence; identical to SEQ ID NO: 176
  Synthetic: LN02_AB_H87

SEQ ID NO: 335 - protein, 116 aa, Artificial Sequence
  Synthetic: LN02_AB_H88
QAPLPESGPGVVRPTGTLSLTCTAAYGSISRHFWGWVRQSPQGTLEWIAHMHHLGVKYVNPSLKNRVSISMDTSKNQMSLTLKTVTATDTAKYHCVRMGARMSDIAFFSFGDWGPG

SEQ ID NO: 336 - protein, 116 aa, Artificial Sequence; identical to SEQ ID NO: 177
  Synthetic: LN02_AB_H89

SEQ ID NO: 337 - protein, 116 aa, Artificial Sequence
  Synthetic: LN02_AB_H90
QAPLPESGPGVVRPTGTLSLTCTAAYGSWSRHFWGWVRQSPQGTLEWIAHMHHLGVKYVNPSLKNRVSISMDTSKNQMSLTLKTVTATDAAKYHCVRMGARMSDIAFFSFGDWGPG

SEQ ID NO: 338 - protein, 116 aa, Artificial Sequence; identical to SEQ ID NO: 178
  Synthetic: LN02_AB_H91

SEQ ID NO: 339 - protein, 116 aa, Artificial Sequence; identical to SEQ ID NO: 179
  Synthetic: LN02_AB_H92

SEQ ID NO: 340 - protein, 116 aa, Artificial Sequence; identical to SEQ ID NO: 180
  Synthetic: LN02_AB_H93

SEQ ID NO: 341 - protein, 116 aa, Artificial Sequence; identical to SEQ ID NO: 181
  Synthetic: LN02_AB_H94

SEQ ID NO: 342 - protein, 116 aa, Artificial Sequence; identical to SEQ ID NO: 182
  Synthetic: LN02_AB_H95

SEQ ID NO: 343 - protein, 116 aa, Artificial Sequence; identical to SEQ ID NO: 183
  Synthetic: LN02_AB_H96

SEQ ID NO: 344 - protein, 116 aa, Artificial Sequence; identical to SEQ ID NO: 184
  Synthetic: LN02_AB_H97

SEQ ID NO: 345 - protein, 116 aa, Artificial Sequence; identical to SEQ ID NO: 185
  Synthetic: LN02_AB_H98

SEQ ID NO: 346 - protein, 116 aa, Artificial Sequence; identical to SEQ ID NO: 186
  Synthetic: LN02_AB_H99

SEQ ID NO: 347 - protein, 116 aa, Artificial Sequence; identical to SEQ ID NO: 187
  Synthetic: LN02_AB_H100

SEQ ID NO: 348 - protein, 116 aa, Artificial Sequence; identical to SEQ ID NO: 188
  Synthetic: LN02_AB_H101

SEQ ID NO: 349 - protein, 116 aa, Artificial Sequence; identical to SEQ ID NO: 189
  Synthetic: LN02_AB_H102

SEQ ID NO: 350 - protein, 116 aa, Artificial Sequence; identical to SEQ ID NO: 190
  Synthetic: LN02_AB_H103

SEQ ID NO: 351 - protein, 116 aa, Artificial Sequence; identical to SEQ ID NO: 191
  Synthetic: LN02_AB_H104

SEQ ID NO: 352 - protein, 116 aa, Artificial Sequence; identical to SEQ ID NO: 192
  Synthetic: LN02_AB_H105

SEQ ID NO: 353 - protein, 116 aa, Artificial Sequence; identical to SEQ ID NO: 193
  Synthetic: LN02_AB_H106

SEQ ID NO: 354 - protein, 116 aa, Artificial Sequence; identical to SEQ ID NO: 194
  Synthetic: LN02_AB_H107

SEQ ID NO: 355 - protein, 116 aa, Artificial Sequence; identical to SEQ ID NO: 195
  Synthetic: LN02_AB_H108

SEQ ID NO: 356 - protein, 116 aa, Artificial Sequence; identical to SEQ ID NO: 196
  Synthetic: LN02_AB_H109

SEQ ID NO: 357 - protein, 116 aa, Artificial Sequence; identical to SEQ ID NO: 197
  Synthetic: LN02_AB_H110

SEQ ID NO: 358 - protein, 116 aa, Artificial Sequence; identical to SEQ ID NO: 198
  Synthetic: LN02_AB_H111

SEQ ID NO: 359 - protein, 116 aa, Artificial Sequence; identical to SEQ ID NO: 199
  Synthetic: LN02_AB_H112

SEQ ID NO: 360 - protein, 116 aa, Artificial Sequence; identical to SEQ ID NO: 200
  Synthetic: LN02_AB_H113

SEQ ID NO: 361 - protein, 116 aa, Artificial Sequence; identical to SEQ ID NO: 201
  Synthetic: LN02_AB_H114

SEQ ID NO: 362 - protein, 116 aa, Artificial Sequence; identical to SEQ ID NO: 202
  Synthetic: LN02_AB_H115

SEQ ID NO: 363 - protein, 116 aa, Artificial Sequence; identical to SEQ ID NO: 203
  Synthetic: LN02_AB_H116

SEQ ID NO: 364 - protein, 116 aa, Artificial Sequence; identical to SEQ ID NO: 204
  Synthetic: LN02_AB_H117

SEQ ID NO: 365 - protein, 116 aa, Artificial Sequence; identical to SEQ ID NO: 205
  Synthetic: LN02_AB_H118

SEQ ID NO: 366 - protein, 116 aa, Artificial Sequence; identical to SEQ ID NO: 206
  Synthetic: LN02_AB_H119

SEQ ID NO: 367 - protein, 116 aa, Artificial Sequence; identical to SEQ ID NO: 207
  Synthetic: LN02_AB_H120

SEQ ID NO: 368 - protein, 116 aa, Artificial Sequence; identical to SEQ ID NO: 208
  Synthetic: LN02_AB_H121

SEQ ID NO: 369 - protein, 116 aa, Artificial Sequence; identical to SEQ ID NO: 209
  Synthetic: LN02_AB_H122

SEQ ID NO: 370 - protein, 116 aa, Artificial Sequence; identical to SEQ ID NO: 210
  Synthetic: LN02_AB_H123

SEQ ID NO: 371 - protein, 116 aa, Artificial Sequence; identical to SEQ ID NO: 109
  Synthetic: LN02_AB_H124

SEQ ID NO: 372 - protein, 116 aa, Artificial Sequence; identical to SEQ ID NO: 212
  Synthetic: LN02_AB_H125

SEQ ID NO: 373 - protein, 116 aa, Artificial Sequence; identical to SEQ ID NO: 213
  Synthetic: LN02_AB_H126

SEQ ID NO: 374 - protein, 116 aa, Artificial Sequence; identical to SEQ ID NO: 214
  Synthetic: LN02_AB_H127

SEQ ID NO: 375 - protein, 116 aa, Artificial Sequence; identical to SEQ ID NO: 215
  Synthetic: LN02_AB_H128

SEQ ID NO: 376 - protein, 116 aa, Artificial Sequence; identical to SEQ ID NO: 216
  Synthetic: LN02_AB_H129

SEQ ID NO: 377 - protein, 116 aa, Artificial Sequence; identical to SEQ ID NO: 217
  Synthetic: LN02_AB_H130

SEQ ID NO: 378 - protein, 116 aa, Artificial Sequence; identical to SEQ ID NO: 218
  Synthetic: LN02_AB_H131

SEQ ID NO: 379 - protein, 116 aa, Artificial Sequence; identical to SEQ ID NO: 219
  Synthetic: LN02_AB_H132

SEQ ID NO: 380 - protein, 116 aa, Artificial Sequence; identical to SEQ ID NO: 220
  Synthetic: LN02_AB_H133

SEQ ID NO: 381 - protein, 116 aa, Artificial Sequence; identical to SEQ ID NO: 221
  Synthetic: LN02_AB_H134

SEQ ID NO: 382 - protein, 116 aa, Artificial Sequence; identical to SEQ ID NO: 222
  Synthetic: LN02_AB_H135

SEQ ID NO: 383 - protein, 116 aa, Artificial Sequence; identical to SEQ ID NO: 223
  Synthetic: LN02_AB_H136

SEQ ID NO: 384 - protein, 116 aa, Artificial Sequence; identical to SEQ ID NO: 224
  Synthetic: LN02_AB_H137

SEQ ID NO: 385 - protein, 116 aa, Artificial Sequence; identical to SEQ ID NO: 225
  Synthetic: LN02_AB_H138

SEQ ID NO: 386 - protein, 116 aa, Artificial Sequence; identical to SEQ ID NO: 226
  Synthetic: LN02_AB_H139

SEQ ID NO: 387 - protein, 116 aa, Artificial Sequence
  Synthetic: LN02_AB_H140
QAPLPESGPGVVRPTGTLSLTCTAAYGSISRHFWGWVRQSPQGTLEWIAHMHHLGVKYVNPSLKNRVSISMDTSKNQMSLTLKTVTATDAAKYHCVRMGARMWRIAFFSFGDWGPG

SEQ ID NO: 388 - protein, 116 aa, Artificial Sequence; identical to SEQ ID NO: 227
  Synthetic: LN02_AB_H141

SEQ ID NO: 389 - protein, 116 aa, Artificial Sequence; identical to SEQ ID NO: 228
  Synthetic: LN02_AB_H142

SEQ ID NO: 390 - protein, 116 aa, Artificial Sequence; identical to SEQ ID NO: 229
  Synthetic: LN02_AB_H143

SEQ ID NO: 391 - protein, 116 aa, Artificial Sequence; identical to SEQ ID NO: 230
  Synthetic: LN02_AB_H144

SEQ ID NO: 392 - protein, 116 aa, Artificial Sequence; identical to SEQ ID NO: 231
  Synthetic: LN02_AB_H145

SEQ ID NO: 393 - protein, 116 aa, Artificial Sequence; identical to SEQ ID NO: 232
  Synthetic: LN02_AB_H146

SEQ ID NO: 394 - protein, 116 aa, Artificial Sequence; identical to SEQ ID NO: 233
  Synthetic: LN02_AB_H147

SEQ ID NO: 395 - protein, 116 aa, Artificial Sequence
  Synthetic: LN02_AB_H148
QVPLPESGPGVVRPTGTLSLTCTAAYGSISRHFWGWVRQSPQGTLEWIAHMHHLGVKYVNPSLKNRVSISMDTSKNQMSLTLKTVTATDAAKYHCVRMGARMSDIAFFSFGDWGPG

SEQ ID NO: 396 - protein, 116 aa, Artificial Sequence
  Synthetic: LN02_AB_H149
QAQLPESGPGVVRPTGTLSLTCTAAYGSISRHFWGWVRQSPQGTLEWIAHMHHLGVKYVNPSLKNRVSISMDTSKNQMSLTLKTVTATDAAKYHCVRMGARMSDIAFFSFGDWGPG

SEQ ID NO: 397 - protein, 116 aa, Artificial Sequence
  Synthetic: LN02_AB_H150
QAPLPESGPGVVRPSGTLSLTCTAAYGSISRHFWGWVRQSPQGTLEWIAHMHHLGVKYVNPSLKNRVSISMDTSKNQMSLTLKTVTATDAAKYHCVRMGARMSDIAFFSFGDWGPG

SEQ ID NO: 398 - protein, 116 aa, Artificial Sequence
  Synthetic: LN02_AB_H151
QAPLPESGPGVVRPTETLSLTCTAAYGSISRHFWGWVRQSPQGTLEWIAHMHHLGVKYVNPSLKNRVSISMDTSKNQMSLTLKTVTATDAAKYHCVRMGARMSDIAFFSFGDWGPG

SEQ ID NO: 399 - protein, 116 aa, Artificial Sequence; identical to SEQ ID NO: 180
  Synthetic: LN02_AB_H152

SEQ ID NO: 400 - protein, 116 aa, Artificial Sequence
  Synthetic: LN02_AB_H153
QAPLPESGPGVVRPTGTLSLTCTAAYGSISSHFWGWVRQSPQGTLEWIAHMHHLGVKYVNPSLKNRVSISMDTSKNQMSLTLKTVTATDAAKYHCVRMGARMSDIAFFSFGDWGPG

SEQ ID NO: 401 - protein, 116 aa, Artificial Sequence
  Synthetic: LN02_AB_H154
QAPLPESGPGVVRPTGTLSLTCTAAYGSISRYYWGWVRQSPQGTLEWIAHMHHLGVKYVNPSLKNRVSISMDTSKNQMSLTLKTVTATDAAKYHCVRMGARMSDIAFFSFGDWGPG

SEQ ID NO: 402 - protein, 116 aa, Artificial Sequence
  Synthetic: LN02_AB_H155
QAPLPESGPGVVRPTGTLSLTCTAAYGSISRHFWGWVRQSPQGTLEWIAEMHHLGVKYVNPSLKNRVSISMDTSKNQMSLTLKTVTATDAAKYHCVRMGARMSDIAFFSFGDWGPG

SEQ ID NO: 403 - protein, 116 aa, Artificial Sequence
  Synthetic: LN02_AB_H156
QAPLPESGPGVVRPTGTLSLTCTAAYGSISRHFWGWVRQSPQGTLEWIASMHHLGVKYVNPSLKNRVSISMDTSKNQMSLTLKTVTATDAAKYHCVRMGARMSDIAFFSFGDWGPG

SEQ ID NO: 404 - protein, 116 aa, Artificial Sequence
  Synthetic: LN02_AB_H157
QAPLPESGPGVVRPTGTLSLTCTAAYGSISRHFWGWVRQSPQGTLEWIAQMHHLGVKYVNPSLKNRVSISMDTSKNQMSLTLKTVTATDAAKYHCVRMGARMSDIAFFSFGDWGPG

SEQ ID NO: 405 - protein, 116 aa, Artificial Sequence; identical to SEQ ID NO: 306
  Synthetic: LN02_AB_H158

SEQ ID NO: 406 - protein, 116 aa, Artificial Sequence
  Synthetic: LN02_AB_H159
QAPLPESGPGVVRPTGTLSLTCTAAYGSISRHFWGWVRQSPQGTLEWIAHMHNLGVKYVNPSLKNRVSISMDTSKNQMSLTLKTVTATDAAKYHCVRMGARMSDIAFFSFGDWGPG

SEQ ID NO: 407 - protein, 116 aa, Artificial Sequence
  Synthetic: LN02_AB_H160
QAPLPESGPGVVRPTGTLSLTCTAAYGSISRHFWGWVRQSPQGTLEWIAHMHDLGVKYVNPSLKNRVSISMDTSKNQMSLTLKTVTATDAAKYHCVRMGARMSDIAFFSFGDWGPG

SEQ ID NO: 408 - protein, 116 aa, Artificial Sequence
  Synthetic: LN02_AB_H161
QAPLPESGPGVVRPTGTLSLTCTAAYGSISRHFWGWVRQSPQGTLEWIAHMHHLGVKYVSPSLKNRVSISMDTSKNQMSLTLKTVTATDAAKYHCVRMGARMSDIAFFSFGDWGPG

SEQ ID NO: 409 - protein, 116 aa, Artificial Sequence
  Synthetic: LN02_AB_H162
QAPLPESGPGVVRPTGTLSLTCTAAYGSISRHFWGWVRQSPQGTLEWIAHMHHLGVKYVNPSIKNRVSISMDTSKNQMSLTLKTVTATDAAKYHCVRMGARMSDIAFFSFGDWGPG

SEQ ID NO: 410 - protein, 116 aa, Artificial Sequence
  Synthetic: LN02_AB_H163
QAPLPESGPGVVRPTGTLSLTCTAAYGSISRHFWGWVRQSPQGTLEWIAHMHHLGVKYVNPSLKNRVSISMDTSKNQMSLTLKTVTATDAAKYHCVRVGARMSDIAFFSFGDWGPG

SEQ ID NO: 411 - protein, 116 aa, Artificial Sequence
  Synthetic: LN02_AB_H164
QAPLPESGPGVVRPTGTLSLTCTAAYGSISRHFWGWVRQSPQGTLEWIAHMHHLGVKYVNPSLKNRVSISMDTSKNQMSLTLKTVTATDAAKYHCVRFGARMSDIAFFSFGDWGPG

SEQ ID NO: 412 - protein, 116 aa, Artificial Sequence; identical to SEQ ID NO: 222
  Synthetic: LN02_AB_H165

SEQ ID NO: 413 - protein, 116 aa, Artificial Sequence
  Synthetic: LN02_AB_H166
QAPLPESGPGVVRPTGTLSLTCTAAYGSISRHFWGWVRQSPQGTLEWIAHMHHLGVKYVNPSLKNRVSISMDTSKNQMSLTLKTVTATDAAKYHCVRMGALMSDIAFFSFGDWGPG

SEQ ID NO: 414 - protein, 116 aa, Artificial Sequence
  Synthetic: LN02_AB_H167
QAPLPESGPGVVRPTGTLSLTCTAAYGSISRHFWGWVRQSPQGTLEWIAHMHHLGVKYVNPSLKNRVSISMDTSKNQMSLTLKTVTATDAAKYHCVRMGAIMSDIAFFSFGDWGPG

SEQ ID NO: 415 - protein, 116 aa, Artificial Sequence
  Synthetic: LN02_AB_H168
QAPLPESGPGVVRPTGTLSLTCTAAYGSISRHFWGWVRQSPQGTLEWIAHMHHLGVKYVNPSLKNRVSISMDTSKNQMSLTLKTVTATDAAKYHCVRMGADMSDIAFFSFGDWGPG

SEQ ID NO: 416 - protein, 116 aa, Artificial Sequence
  Synthetic: LN02_AB_H169
QAPLPESGPGVVRPTGTLSLTCTAAYGSISRHFWGWVRQSPQGTLEWIAHMHHLGVKYVNPSLKNRVSISMDTSKNQMSLTLKTVTATDAAKYHCVRMGARMEDIAFFSFGDWGPG

SEQ ID NO: 417 - protein, 116 aa, Artificial Sequence
  Synthetic: LN02_AB_H170
QAPLPESGPGVVRPTGTLSLTCTAAYGSISRHFWGWVRQSPQGTLEWIAHMHHLGVKYVNPSLKNRVSISMDTSKNQMSLTLKTVTATDAAKYHCVRMGARMRDIAFFSFGDWGPG

SEQ ID NO: 418 - protein, 116 aa, Artificial Sequence; identical to SEQ ID NO: 227
  Synthetic: LN02_AB_H171

SEQ ID NO: 419 - protein, 116 aa, Artificial Sequence
  Synthetic: LN02_AB_H172
QAPLPESGPGVVRPTGTLSLTCTAAYGSISRHFWGWVRQSPQGTLEWIAHMHHLGVKYVNPSLKNRVSISMDTSKNQMSLTLKTVTATDAAKYHCVRMGARMSDIDFFSFGDWGPG

SEQ ID NO: 420 - protein, 116 aa, Artificial Sequence
  Synthetic: LN02_AB_H173
QAPLPESGPGVVRPTGTLSLTCTAAYGKISRHFWGWVRQSPQGTLEWIAHMHHLGVKYVNPSLKNRVSISMDTSKNQMSLTLKTVTATDAAKYHCVRMGARMSDIAFFSFGDWGPG

SEQ ID NO: 421 - protein, 116 aa, Artificial Sequence
  Synthetic: LN02_AB_H174
QAPLPESGPGVVRPTGTLSLTCTAAYGEISRHFWGWVRQSPQGTLEWIAHMHHLGVKYVNPSLKNRVSISMDTSKNQMSLTLKTVTATDAAKYHCVRMGARMSDIAFFSFGDWGPG

SEQ ID NO: 422 - protein, 116 aa, Artificial Sequence
  Synthetic: LN02_AB_H175
QAPLPESGPGVVRPTGTLSLTCTAAYGAISRHFWGWVRQSPQGTLEWIAHMHHLGVDYVNPSLKNRVSISMDTSKNQMSLTLKTVTATDAAKYHCVRMGARMSDIAFFSFGDWGPG

SEQ ID NO: 423 - protein, 116 aa, Artificial Sequence
  Synthetic: LN02_AB_H176
QAPLPESGPGVVRPTGTLSLTCTAAYGSISRHFWGWVRQSPQGTLEWIAHEHHLGVKYVNPSLKNRVSISMDTSKNQMSLTLKTVTATDAAKYHCVRMGARMSDIAFFSFGDWGPG

SEQ ID NO: 424 - protein, 116 aa, Artificial Sequence
  Synthetic: LN02_AB_H177
QAPLPESGPGVVRPTGTLSLTCTAAYGSISRHFWGWVRQSPQGTLEWIAHMHHLGAKYVNPSLKNRVSISMDTSKNQMSLTLKTVTATDAAKYHCVRMGARMSDIAFFSFGDWGPG

SEQ ID NO: 425 - protein, 116 aa, Artificial Sequence
  Synthetic: LN02_AB_H178
QAPLPESGPGVVRPTGTLSLTCTAAYGSISRHFWGWVRQSPQGTLEWIAHMHHLGMKYVNPSLKNRVSISMDTSKNQMSLTLKTVTATDAAKYHCVRMGARMSDIAFFSFGDWGPG

SEQ ID NO: 426 - protein, 116 aa, Artificial Sequence; identical to SEQ ID NO: 409
  Synthetic: LN02_AB_H179

SEQ ID NO: 427 - protein, 116 aa, Artificial Sequence
  Synthetic: LN02_AB_H180
QAPLPESGPGVVRPTGTLSLTCTAAYGSISRHFWGWVRQSPQGTLEWIAHMHHLGVDYVNPSLKNRVSISMDTSKNQMSLTLKTVTATDAAKYHCVRVGARMSDIAFFSFGDWGPG

SEQ ID NO: 428 - protein, 116 aa, Artificial Sequence
  Synthetic: LN02_AB_H181
QAPLPESGPGVVRPTGTLSLTCTAAYGSISRHFWGWVRQSPQGTLEWIAHMHHLGVDYVNPSLKNRVSISMDTSKNQMSLTLKTVTATDAAKYHCVRFGARMSDIAFFSFGDWGPG

SEQ ID NO: 429 - protein, 116 aa, Artificial Sequence
  Synthetic: LN02_AB_H182
QAPLPESGPGVVRPTGTLSLTCTAAYGSISRHFWGWVRQSPQGTLEWIAHMHHLGVDYVNPSLKNRVSISMDTSKNQMSLTLKTVTATDAAKYHCVRMGARMMDIAFFSFGDWGPG

SEQ ID NO: 430 - protein, 116 aa, Artificial Sequence
  Synthetic: LN02_AB_H183
QAPLPESGPGVVRPTGTLSLTCTAAYGSINRHFWGWVRQSPQGTLEWIAHMHHLGVKYVNPSLKNRVSISMDTSKNQMSLTLKTVTATDAAKYHCVRMGARMSDIAFFSFGDWGPG

SEQ ID NO: 431 - protein, 116 aa, Artificial Sequence
  Synthetic: LN02_AB_H184
QAQLQESGPGVVRPTGTLSLTCTASYGSISRHFWGWVRQSPQGTLEWIAHMHHLGMKYVNPSLKNRVSISMDTSKNQMSLTLKTVTATDAAKYHCVRMGARMSDIAFFSFGDWGQG

SEQ ID NO: 432 - protein, 116 aa, Artificial Sequence
  Synthetic: LN02_AB_H185
QAPLPESGPGVVRPTGTLSLTCTAAYGSISRHFWGWVRQAPRGGLEWIAHMHHLGMKYVNPSLKNRVSISMDTSKNQMSLTLKTVTATDAAKYHCVRMGARMSDIAFFSFGDWGPG

SEQ ID NO: 433 - protein, 116 aa, Artificial Sequence
  Synthetic: LN02_AB_H186
QAPLPESGPGVVRPTGTLSLTCTAAYGSISRHFWGWVRQPPRKGLEWIAHMHHLGMKYVNPSLKNRVSISMDTSKNQMSLTLKTVTATDAAKYHCVRMGARMSDIAFFSFGDWGPG

SEQ ID NO: 434-443 - skipped (10 entries)

SEQ ID NO: 444 - protein, 116 aa, Artificial Sequence
  Synthetic: LN02_AB_H187
QAPLPESGPGVVRPTGTLSLTCTAAYGSISRHFWGWVRQSPGKGLEWIAHMHHLGMKYVNPSLKNRVSISMDTSKNQMSLTLKTVTATDAAKYHCVRMGARMSDIAFFSFGDWGPG

SEQ ID NO: 445 - protein, 116 aa, Artificial Sequence
  Synthetic: LN02_AB_H188
QAPLPESGPGVVRPTGTLSLTCTAAYGSISRHFWGWVRQSPQGTLEWIAHMHHLGMKYVNPSLKSRVTISMDTSKNQMSLKLVTVTATDAAKYHCVRMGARMSDIAFFSFGDWGPG

SEQ ID NO: 446-455 - skipped (10 entries)

SEQ ID NO: 456 - protein, 116 aa, Artificial Sequence
  Synthetic: LN02_AB_H189
QAPLPESGPGVVRPTGTLSLTCTAAYGSISRHFWGWVRQSPQGTLEWIAHMHHLGMKYVNPSLKNRVSISMDKSKNQMSLTLKTVTATDAAKYHCVRMGARMSDIAFFSFGDWGPG

SEQ ID NO: 457 - protein, 116 aa, Artificial Sequence
  Synthetic: LN02_AB_H190
QAPLPESGPGVVRPTGTLSLTCTAAYGSISRHFWGWVRQSPQGTLEWIAHMHHLGMKYVNPSLKNRVSISMDHSKNQMSLTLKTVTATDAAKYHCVRMGARMSDIAFFSFGDWGPG

SEQ ID NO: 458 - protein, 116 aa, Artificial Sequence
  Synthetic: LN02_AB_H191
QAPLPESGPGVVRPTGTLSLTCTAAYGSISRHFWGWVRQSPQGTLEWIAHMHHLGMKYVNPSLKNRVSISMDQSKNQMSLTLKTVTATDAAKYHCVRMGARMSDIAFFSFGDWGPG

SEQ ID NO: 459 - protein, 116 aa, Artificial Sequence
  Synthetic: LN02_AB_H192
QAPLPESGPGVVRPTGTLSLTCTAAYGSISRHFWGWVRQSPQGTLEWIAHMHHLGMKYVNPSLKNRVSISMDNSKNQMSLTLKTVTATDAAKYHCVRMGARMSDIAFFSFGDWGPG

SEQ ID NO: 460 - protein, 116 aa, Artificial Sequence
  Synthetic: LN02_AB_H193
QAPLPESGPGVVRPTGTLSLTCTAAYGSISRHFWGWVRQSPQGTLEWIAHMHHLGMKYVNPSLKNRVSISMDGSKNQMSLTLKTVTATDAAKYHCVRMGARMSDIAFFSFGDWGPG

SEQ ID NO: 461 - protein, 116 aa, Artificial Sequence
  Synthetic: LN02_AB_H194
QAPLPESGPGVVRPTGTLSLTCTAAYGSISRHFWGWVRQSPQGTLEWIAHMHHLGMKYVNPSLKNRVSISMDTSKNQLSLTLKTVTATDAAKYHCVRMGARMSDIAFFSFGDWGPG

SEQ ID NO: 462 - protein, 116 aa, Artificial Sequence
  Synthetic: LN02_AB_H195
QAPLPESGPGVVRPTGTLSLTCTAAYGSISRHFWGWVRQSPQGTLEWIAHMHHLGMKYVNPSLKNRVSISMDTSKNQFSLTLKTVTATDAAKYHCVRMGARMSDIAFFSFGDWGPG

SEQ ID NO: 463 - protein, 116 aa, Artificial Sequence
  Synthetic: LN02_AB_H196
QAPLPESGPGVVRPTGTLSLTCTAAYGSISRHFWGWVRQSPQGTLEWIAHMHHLGMKYVNPSLKNRVSISVDTSKNQMSLTLKTVTATDAAKYHCVRMGARMSDIAFFSFGDWGPG

SEQ ID NO: 464 - protein, 116 aa, Artificial Sequence
  Synthetic: LN02_AB_H197
QAPLPESGPGVVRPTGTLSLTCTAAYGSISRHFWGWVRQSPQGTLEWIAHLHHLGMKYVNPSLKNRVSISVDTSKNQMSLTLKTVTATDAAKYHCVRMGARMSDIAFFSFGDWGPG

SEQ ID NO: 465 - protein, 116 aa, Artificial Sequence
  Synthetic: LN02_AB_H198
QAPLPESGPGVVRPTGTLSLTCTAAYGSISRHFWGWVRQSPQGTLEWIAHMHHLGMKYVNPSLKNRVSISMDTSKNQMSLTLKTVTATDAAVYYCVRMGARMSDIAFFSFGDWGPG

SEQ ID NO: 466 - protein, 116 aa, Artificial Sequence
  Synthetic: LN02_AB_H199
QAPLPESGPGVVRPTGTLSLTCTAAYGSISRHFWGWVRQSPQGTLEWIAHMHHLGMKYVNPSLKNRVSISMDTSKNQMSLTLKTVTATDTAKYHCVRMGARMSDIAFFSFGDWGPG

SEQ ID NO: 467 - protein, 116 aa, Artificial Sequence
  Synthetic: LN02_AB_H200
QAPLPESGPGVVRPTGTLSLTCTAAYGSISRHFWGWVRQSPQGTLEWIAHMHHLGMKYVNPSLKNRVSISMDTSKNQMSLTLKTVTATDAAKYHCVRMGAYMSDIAFFSFGDWGPG

SEQ ID NO: 468 - protein, 116 aa, Artificial Sequence
  Synthetic: LN02_AB_H201
QAPLPESGPGVVRPTGTLSLTCTAAYGSISRHFWGWVRQSPQGTLEWIAHMHHLGMKYVNPSLKNRVSISMDTSKNQMSLTLKTVTATDAAKYHCVRMGAHMSDIAFFSFGDWGPG

SEQ ID NO: 469 - protein, 116 aa, Artificial Sequence
  Synthetic: LN02_AB_H202
QAPLPESGPGVVRPTGTLSLTCTAAYGSISRHFWGWVRQSPQGTLEWIAHMHHLGMKYVNPSLKNRVSISMDTSKNQMSLTLKTVTATDAAKYHCVRMGAAMSDIAFFSFGDWGPG

SEQ ID NO: 470 - protein, 116 aa, Artificial Sequence
  Synthetic: LN02_AB_H203
QAPLPESGPGVVRPTGTLSLTCTAAYGSISRHFWGWVRQSPQGTLEWIAHMHHLGMKYVNPSLKNRVSISMDTSKNQMSLTLKTVTATDAAKYHCVRMGANMSDIAFFSFGDWGPG

SEQ ID NO: 471 - protein, 116 aa, Artificial Sequence
  Synthetic: LN02_AB_H204
QAPLPESGPGVVRPTGTLSLTCTAAYGSISRHFWGWVRQSPQGTLEWIAHMHHLGMKYVNPSLKNRVSISMDTSKNQMSLTLKTVTATDAAKYHCVRMGAQMSDIAFFSFGDWGPG

SEQ ID NO: 472 - protein, 116 aa, Artificial Sequence
  Synthetic: LN02_AB_H205
QAPLPESGPGVVRPTGTLSLTCTAAYGSISRHFWGWVRQSPQGTLEWIAHMHSLGMKYVNPSLKNRVSISMDTSKNQMSLTLKTVTATDAAKYHCVRMGARMSDIAFFSFGDWGPG

SEQ ID NO: 473 - protein, 116 aa, Artificial Sequence
  Synthetic: LN02_AB_H206
QAPLPESGPGVVRPTGTLSLTCTAAYGSISRHFWGWVRQSPQGTLEWIAHMHHLGMKYVNPSLKNRVSISMDTSKNQMSLTLKTVTATDAAKYHCVRMGARMSTIAFFSFGDWGPG

SEQ ID NO: 474 - protein, 116 aa, Artificial Sequence
  Synthetic: LN02_AB_H207
QAPLPESGPGVVRPTGTLSLTCTAAYGSISRHFWGWVRQSPQGTLEWIAHMHHLGMKYVNPSLKNRVSISMDTSKNQMSLTLKTVTATDAAKYHCVRMGARMSNIAFFSFGDWGPG

SEQ ID NO: 475 - protein, 116 aa, Artificial Sequence
  Synthetic: LN02_AB_H208
QAPLPESGPGVVRPTGTLSLTCTAAYGSISRHFWGWVRQSPQGTLEWIAHMHHLGMKYVNPSLKNRVSISMDTSKNQMSLTLKTVTATDAAKYHCVRMGARMSVIAFFSFGDWGPG

SEQ ID NO: 476 - protein, 116 aa, Artificial Sequence
  Synthetic: LN02_AB_H209
QAPLPESGPGVVRPTGTLSLTCTAAYGSISRHFWGWVRQSPQGTLEWIAHMHHLGMKYVNPSLKNRVSISMDTSKNQMSLTLKTVTATDAAKYHCVRMGARMSHIAFFSFGDWGPG

SEQ ID NO: 477 - protein, 116 aa, Artificial Sequence
  Synthetic: LN02_AB_H210
QAPLPESGPGVVRPTGTLSLTCTAAYGSISRHFWGWVRQSPQGTLEWIAHMHHLGMKYVNPSLKNRVSISMDTSKNQMSLTLKTVTATDAAKYHCVRMGARMSMIAFFSFGDWGPG

SEQ ID NO: 478 - protein, 116 aa, Artificial Sequence
  Synthetic: LN02_AB_H211
QAPLPESGPGVVRPTGTLSLTCTAAYGSIHRHFWGWVRQSPQGTLEWIAHMHHLGMKYVNPSLKNRVSISMDTSKNQMSLTLKTVTATDAAKYHCVRMGARMSDIAFFSFGDWGPG

SEQ ID NO: 479 - protein, 116 aa, Artificial Sequence
  Synthetic: LN02_AB_H212
QVPLPESGPGVVRPTGTLSLTCTAAYGSISRHFWGWVRQSPQGTLEWIAHMHHLGVKYVNPSLKNRVSISMDTSKNQMSLTLKTVTATDAAKYHCVRMGARMSDVAFFSFGDWGPG

SEQ ID NO: 480 - protein, 116 aa, Artificial Sequence; identical to SEQ ID NO: 395
  Synthetic: LN02_AB_H212

SEQ ID NO: 481 - protein, 116 aa, Artificial Sequence; identical to SEQ ID NO: 395
  Synthetic: LN02_AB_H212

SEQ ID NO: 482 - protein, 116 aa, Artificial Sequence; identical to SEQ ID NO: 395
  Synthetic: LN02_AB_H212

SEQ ID NO: 483 - protein, 109 aa, Artificial Sequence; identical to SEQ ID NO: 1
  Synthetic: LN02_light chain New Dora

SEQ ID NO: 484 - protein, 100 aa, Artificial Sequence
  Synthetic: AB-004223-1_LN02*-VL
SYVLGQSSSMSVAPGQTAKISCWGYYMGTKPVNWYQLKPGRAPSLIISYDDERASGTPARFSGSHSGSTATLTISNVVPADEADYFCQVWDSKYEEIYFG

SEQ ID NO: 485 - protein, 100 aa, Artificial Sequence
  Synthetic: AB-004223-3_460_VL
SYVLGQSPSMSVAPGQTAKISCWGYYMGSKPVNWYQLKPGRAPLLMISYDDERDSETPARFSGSHSGSTATLTISNVVPADEADYFCQVWDSKYEEIYFG

SEQ ID NO: 486 - protein, 100 aa, Artificial Sequence
  Synthetic: AB-004223-4_461_VL
SYVLTQSSSLSVAPGQTAKISCWGYYMGSKPVNWYQLRPGRAPSLIIWYDNERASGVPARFSGSHSGGTATLTISSVVPEDEADYYCQVWDSGYEEIYFG

SEQ ID NO: 487 - protein, 100 aa, Artificial Sequence
  Synthetic: AB-004223-5_462_VL
TYGLSQRSSMSVALGATAKITCGGSRIGDRAVQWYQVRPGRAPTLIIFYDNERPSSVSGRFSGSSSASTATLVIDKVEAGDEGDYYCQVWDSRSDSIVFG

SEQ ID NO: 488 - protein, 100 aa, Artificial Sequence
  Synthetic: AB-004223-5-VL
SYGLSQSRSMSVALGATAKITCGGSRIGDRAVQWYQVRPGRAPTLIIFYDNERPSSVSGRFSGSSSASTATLVIDKVEAGDEGDYYCQVWDSRSDSIVFG

SEQ ID NO: 489 - protein, 100 aa, Artificial Sequence
  Synthetic: AB-004223-2_463_VL
SYVLTQSSSLSVAPGQTAKISCWGYYMGSKPVNWYQLRPGRAPSLIIWYDNQRASGVPARFSGSHSGGTATLTISSVVPEDEADYFCQVWDSGYEEIYFG

SEQ ID NO: 490 - protein, 98 aa, Artificial Sequence; identical to SEQ ID NO: 2
  Synthetic: IGLV3-21*01_germline

SEQ ID NO: 491 - protein, 100 aa, Artificial Sequence; identical to SEQ ID NO: 3
  Synthetic: LN02_M-L01

SEQ ID NO: 492 - protein, 100 aa, Artificial Sequence; identical to SEQ ID NO: 4
  Synthetic: LN02_M-L02

SEQ ID NO: 493 - protein, 100 aa, Artificial Sequence; identical to SEQ ID NO: 5
  Synthetic: LN02_M-L03

SEQ ID NO: 494 - protein, 100 aa, Artificial Sequence; identical to SEQ ID NO: 6
  Synthetic: LN02_M-L04

SEQ ID NO: 495 - protein, 100 aa, Artificial Sequence; identical to SEQ ID NO: 7
  Synthetic: LN02_M-L05

SEQ ID NO: 496 - protein, 100 aa, Artificial Sequence; identical to SEQ ID NO: 8
  Synthetic: LN02_M-L06

SEQ ID NO: 497 - protein, 100 aa, Artificial Sequence; identical to SEQ ID NO: 9
  Synthetic: LN02_M-L07

SEQ ID NO: 498 - protein, 100 aa, Artificial Sequence; identical to SEQ ID NO: 10
  Synthetic: LN02_M-L08

SEQ ID NO: 499 - protein, 100 aa, Artificial Sequence; identical to SEQ ID NO: 11
  Synthetic: LN02_M-L09

SEQ ID NO: 500 - protein, 100 aa, Artificial Sequence; identical to SEQ ID NO: 12
  Synthetic: LN02_M-L10

SEQ ID NO: 501 - protein, 100 aa, Artificial Sequence; identical to SEQ ID NO: 13
  Synthetic: LN02_M-L11

SEQ ID NO: 502 - protein, 100 aa, Artificial Sequence; identical to SEQ ID NO: 14
  Synthetic: LN02_M-L12

SEQ ID NO: 503 - protein, 100 aa, Artificial Sequence; identical to SEQ ID NO: 15
  Synthetic: LN02_M-L13

SEQ ID NO: 504 - protein, 100 aa, Artificial Sequence; identical to SEQ ID NO: 16
  Synthetic: LN02_M-L14

SEQ ID NO: 505 - protein, 100 aa, Artificial Sequence; identical to SEQ ID NO: 17
  Synthetic: LN02_M-L15

SEQ ID NO: 506 - protein, 100 aa, Artificial Sequence; identical to SEQ ID NO: 18
  Synthetic: LN02_M-L16

SEQ ID NO: 507 - protein, 100 aa, Artificial Sequence; identical to SEQ ID NO: 19
  Synthetic: LN02_M-L17

SEQ ID NO: 508 - protein, 100 aa, Artificial Sequence; identical to SEQ ID NO: 20
  Synthetic: LN02_M-L18

SEQ ID NO: 509 - protein, 100 aa, Artificial Sequence; identical to SEQ ID NO: 21
  Synthetic: LN02_M-L19

SEQ ID NO: 510 - protein, 100 aa, Artificial Sequence
  Synthetic: LN02_M-L20
SYVLGQSSSMSVAPGQTAKISCWGYYMGTRPVNWYQLKPGRAPSLIISYDDERASGTPARFSGSHSGSTATLTISNVVPADEADYFCQVWDSKYEEIYFG

SEQ ID NO: 511 - protein, 100 aa, Artificial Sequence; identical to SEQ ID NO: 22
  Synthetic: LN02_M-L21

SEQ ID NO: 512 - protein, 100 aa, Artificial Sequence; identical to SEQ ID NO: 23
  Synthetic: LN02_M-L22

SEQ ID NO: 513 - protein, 100 aa, Artificial Sequence; identical to SEQ ID NO: 24
  Synthetic: LN02_M-L23

SEQ ID NO: 514 - protein, 100 aa, Artificial Sequence; identical to SEQ ID NO: 25
  Synthetic: LN02_M-L24

SEQ ID NO: 515 - protein, 100 aa, Artificial Sequence; identical to SEQ ID NO: 26
  Synthetic: LN02_M-L25

SEQ ID NO: 516 - protein, 100 aa, Artificial Sequence; identical to SEQ ID NO: 67
  Synthetic: LN02_M-L26

SEQ ID NO: 517 - protein, 100 aa, Artificial Sequence; identical to SEQ ID NO: 27
  Synthetic: LN02_M-L27

SEQ ID NO: 518 - protein, 100 aa, Artificial Sequence; identical to SEQ ID NO: 28
  Synthetic: LN02_M-L28

SEQ ID NO: 519 - protein, 100 aa, Artificial Sequence; identical to SEQ ID NO: 29
  Synthetic: LN02_M-L29

SEQ ID NO: 520 - protein, 100 aa, Artificial Sequence; identical to SEQ ID NO: 30
  Synthetic: LN02_M-L30

SEQ ID NO: 521 - protein, 100 aa, Artificial Sequence; identical to SEQ ID NO: 31
  Synthetic: LN02_M-L31

SEQ ID NO: 522 - protein, 100 aa, Artificial Sequence; identical to SEQ ID NO: 32
  Synthetic: LN02_M-L32

SEQ ID NO: 523 - protein, 100 aa, Artificial Sequence
  Synthetic: LN02_M-L33
SYVLGQSSSMSVAPGQTAKISCWGYYMGTKPVNWYQLKPGRAPSLIISYDDERASGTPARFSGSHSGSTATLTISNVVPADEADYFCQVWDSKYEELYFG

SEQ ID NO: 524 - protein, 100 aa, Artificial Sequence; identical to SEQ ID NO: 33
  Synthetic: LN02_M-L34

SEQ ID NO: 525 - protein, 100 aa, Artificial Sequence; identical to SEQ ID NO: 34
  Synthetic: LN02_M-L35

SEQ ID NO: 526 - protein, 100 aa, Artificial Sequence; identical to SEQ ID NO: 35
  Synthetic: LN02_M-L36

SEQ ID NO: 527 - protein, 100 aa, Artificial Sequence; identical to SEQ ID NO: 36
  Synthetic: LN02_M-L37

SEQ ID NO: 528 - protein, 100 aa, Artificial Sequence; identical to SEQ ID NO: 37
  Synthetic: LN02_M-L38

SEQ ID NO: 529 - protein, 100 aa, Artificial Sequence; identical to SEQ ID NO: 38
  Synthetic: LN02_M-L39

SEQ ID NO: 530 - protein, 100 aa, Artificial Sequence; identical to SEQ ID NO: 39
  Synthetic: LN02_M-L40

SEQ ID NO: 531 - protein, 100 aa, Artificial Sequence; identical to SEQ ID NO: 40
  Synthetic: LN02_M-L41

SEQ ID NO: 532 - protein, 100 aa, Artificial Sequence; identical to SEQ ID NO: 41
  Synthetic: LN02_M-L42

SEQ ID NO: 533 - protein, 100 aa, Artificial Sequence
  Synthetic: LN02_M-L43
SYVLGQSSSMSVAPGQTAKISCWGYYMGDKPVNWYQLKPGRAPSLIISYDDERASGTPARFSGSHSGSTATLTISNVVPADEADYFCQVWDSKYEEIYFG

SEQ ID NO: 534 - protein, 100 aa, Artificial Sequence; identical to SEQ ID NO: 42
  Synthetic: LN02_M-L44

SEQ ID NO: 535 - protein, 100 aa, Artificial Sequence; identical to SEQ ID NO: 43
  Synthetic: LN02_M-L45

SEQ ID NO: 536 - protein, 100 aa, Artificial Sequence; identical to SEQ ID NO: 44
  Synthetic: LN02_M-L46

SEQ ID NO: 537 - protein, 100 aa, Artificial Sequence; identical to SEQ ID NO: 45
  Synthetic: LN02_M-L47

SEQ ID NO: 538 - protein, 100 aa, Artificial Sequence; identical to SEQ ID NO: 46
  Synthetic: LN02_M-L48

SEQ ID NO: 539 - protein, 100 aa, Artificial Sequence; identical to SEQ ID NO: 47
  Synthetic: LN02_M-L49

SEQ ID NO: 540 - protein, 100 aa, Artificial Sequence
  Synthetic: LN02_M-L50
SYVLGQSSSMSVAPGQTAKISCWGYYMGTKPVNWYQLKPGRAPSLIISYDDERAEGTPARFSGSHSGSTATLTISNVVPADEADYFCQVWDSKYEEIYFG

SEQ ID NO: 541 - protein, 100 aa, Artificial Sequence; identical to SEQ ID NO: 48
  Synthetic: LN02_M-L51

SEQ ID NO: 542 - protein, 100 aa, Artificial Sequence; identical to SEQ ID NO: 49
  Synthetic: LN02_M-L52

SEQ ID NO: 543 - protein, 100 aa, Artificial Sequence; identical to SEQ ID NO: 28
  Synthetic: LN02_M-L53

SEQ ID NO: 544 - protein, 100 aa, Artificial Sequence; identical to SEQ ID NO: 29
  Synthetic: LN02_M-L54

SEQ ID NO: 545 - protein, 100 aa, Artificial Sequence; identical to SEQ ID NO: 52
  Synthetic: LN02_M-L55

SEQ ID NO: 546 - protein, 100 aa, Artificial Sequence; identical to SEQ ID NO: 53
  Synthetic: LN02_M-L56

SEQ ID NO: 547 - protein, 100 aa, Artificial Sequence; identical to SEQ ID NO: 54
  Synthetic: LN02_M-L57

SEQ ID NO: 548 - protein, 100 aa, Artificial Sequence; identical to SEQ ID NO: 55
  Synthetic: LN02_M-L58

SEQ ID NO: 549 - protein, 100 aa, Artificial Sequence
  Synthetic: LN02_M-L59
SYVLGQSSSMSVAPGQTAKISCWGYYMGTKPVNWYQLKPGRAPSLIISYDDERASGTPARFSGSHSGSTATLTISNVVPADEADYFCQVWDSKYEEIYVG

SEQ ID NO: 550 - protein, 100 aa, Artificial Sequence; identical to SEQ ID NO: 56
  Synthetic: LN02_M-L60

SEQ ID NO: 551 - protein, 100 aa, Artificial Sequence
  Synthetic: LN02_M-L61
SYVLGQSSSMSVAPGQTAKISCWGVYMGTKPVNWYQLKPGRAPSLIISYDDERASGTPARFSGSHSGSTATLTISNVVPADEADYFCQVWDSKYEEIYFG

SEQ ID NO: 552 - protein, 100 aa, Artificial Sequence; identical to SEQ ID NO: 57
  Synthetic: LN02_M-L62

SEQ ID NO: 553 - protein, 100 aa, Artificial Sequence; identical to SEQ ID NO: 58
  Synthetic: LN02_M-L63

SEQ ID NO: 554 - protein, 100 aa, Artificial Sequence; identical to SEQ ID NO: 59
  Synthetic: LN02_M-L64

SEQ ID NO: 555 - protein, 100 aa, Artificial Sequence; identical to SEQ ID NO: 9
  Synthetic: LN02_M-L65

SEQ ID NO: 556 - protein, 100 aa, Artificial Sequence; identical to SEQ ID NO: 61
  Synthetic: LN02_M-L66

SEQ ID NO: 557 - protein, 100 aa, Artificial Sequence; identical to SEQ ID NO: 62
  Synthetic: LN02_M-L67

SEQ ID NO: 558 - protein, 100 aa, Artificial Sequence; identical to SEQ ID NO: 63
  Synthetic: LN02_M-L68

SEQ ID NO: 559 - protein, 100 aa, Artificial Sequence; identical to SEQ ID NO: 64
  Synthetic: LN02_M-L69

SEQ ID NO: 560 - protein, 100 aa, Artificial Sequence; identical to SEQ ID NO: 65
  Synthetic: LN02_M-L70

SEQ ID NO: 561 - protein, 100 aa, Artificial Sequence; identical to SEQ ID NO: 66
  Synthetic: LN02_M-L71

SEQ ID NO: 562 - protein, 100 aa, Artificial Sequence; identical to SEQ ID NO: 67
  Synthetic: LN02_M-L72

SEQ ID NO: 563 - protein, 100 aa, Artificial Sequence; identical to SEQ ID NO: 68
  Synthetic: LN02_M-L73

SEQ ID NO: 564 - protein, 100 aa, Artificial Sequence; identical to SEQ ID NO: 69
  Synthetic: LN02_M-L74

SEQ ID NO: 565 - protein, 100 aa, Artificial Sequence; identical to SEQ ID NO: 70
  Synthetic: LN02_M-L75

SEQ ID NO: 566 - protein, 100 aa, Artificial Sequence; identical to SEQ ID NO: 71
  Synthetic: LN02_M-L76

SEQ ID NO: 567 - protein, 100 aa, Artificial Sequence; identical to SEQ ID NO: 72
  Synthetic: LN02_M-L77

SEQ ID NO: 568 - protein, 100 aa, Artificial Sequence; identical to SEQ ID NO: 73
  Synthetic: LN02_M-L78

SEQ ID NO: 569 - protein, 100 aa, Artificial Sequence; identical to SEQ ID NO: 74
  Synthetic: LN02_M-L79

SEQ ID NO: 570 - protein, 100 aa, Artificial Sequence; identical to SEQ ID NO: 75
  Synthetic: LN02_M-L80

SEQ ID NO: 571 - protein, 100 aa, Artificial Sequence; identical to SEQ ID NO: 76
  Synthetic: LN02_M-L81

SEQ ID NO: 572 - protein, 100 aa, Artificial Sequence; identical to SEQ ID NO: 77
  Synthetic: LN02_M-L82

SEQ ID NO: 573 - protein, 100 aa, Artificial Sequence; identical to SEQ ID NO: 78
  Synthetic: LN02_M-L83

SEQ ID NO: 574 - protein, 100 aa, Artificial Sequence; identical to SEQ ID NO: 79
  Synthetic: LN02_M-L84

SEQ ID NO: 575 - protein, 100 aa, Artificial Sequence; identical to SEQ ID NO: 80
  Synthetic: LN02_M-L85

SEQ ID NO: 576 - protein, 100 aa, Artificial Sequence; identical to SEQ ID NO: 81
  Synthetic: LN02_M-L86

SEQ ID NO: 577 - protein, 100 aa, Artificial Sequence; identical to SEQ ID NO: 53
  Synthetic: LN02_M-L87

SEQ ID NO: 578 - protein, 100 aa, Artificial Sequence; identical to SEQ ID NO: 83
  Synthetic: LN02_M-L88

SEQ ID NO: 579 - protein, 100 aa, Artificial Sequence; identical to SEQ ID NO: 84
  Synthetic: LN02_M-L89

SEQ ID NO: 580 - protein, 100 aa, Artificial Sequence; identical to SEQ ID NO: 85
  Synthetic: LN02_M-L90

SEQ ID NO: 581 - protein, 100 aa, Artificial Sequence; identical to SEQ ID NO: 86
  Synthetic: LN02_M-L91

SEQ ID NO: 582 - protein, 100 aa, Artificial Sequence; identical to SEQ ID NO: 87
  Synthetic: LN02_M-L92

SEQ ID NO: 583 - protein, 100 aa, Artificial Sequence; identical to SEQ ID NO: 88
  Synthetic: LN02_M-L93

SEQ ID NO: 584 - protein, 100 aa, Artificial Sequence; identical to SEQ ID NO: 89
  Synthetic: LN02_M-L94

SEQ ID NO: 585 - protein, 100 aa, Artificial Sequence
  Synthetic: LN02_M-L95
SYVLGQSSSMSVAPGQTAKISCWGHYMGTKPVNWYQLKPGRAPSLIISYDDERASGTPARFSGSHSGSTATLTISNVVPADEADYFCQVWDSKYEEIYFG

SEQ ID NO: 586 - protein, 100 aa, Artificial Sequence
  Synthetic: LN02_M-L96
SYVLGQSSSMSVAPGQTAKISCWGQYMGTKPVNWYQLKPGRAPSLIISYDDERASGTPARFSGSHSGSTATLTISNVVPADEADYFCQVWDSKYEEIYFG

SEQ ID NO: 587 - protein, 100 aa, Artificial Sequence
  Synthetic: LN02_M-L97
SYVLGQSSSMSVAPGQTAKISCWGYQMGTKPVNWYQLKPGRAPSLIISYDDERASGTPARFSGSHSGSTATLTISNVVPADEADYFCQVWDSKYEEIYFG

SEQ ID NO: 588 - protein, 100 aa, Artificial Sequence
  Synthetic: LN02_M-L98
SYVLGQSSSMSVAPGQTAKISCWGYYMGQKPVNWYQLKPGRAPSLIISYDDERASGTPARFSGSHSGSTATLTISNVVPADEADYFCQVWDSKYEEIYFG

SEQ ID NO: 589 - protein, 100 aa, Artificial Sequence
  Synthetic: LN02_M-L99
SYVLGQSSSMSVAPGQTAKISCWGYYMGEKPVNWYQLKPGRAPSLIISYDDERASGTPARFSGSHSGSTATLTISNVVPADEADYFCQVWDSKYEEIYFG

SEQ ID NO: 590 - protein, 100 aa, Artificial Sequence; identical to SEQ ID NO: 510
  Synthetic: LN02_M-L100

SEQ ID NO: 591 - protein, 100 aa, Artificial Sequence
  Synthetic: LN02_M-L101
SYVLGQSSSMSVAPGQTAKISCWGYYMGTAPVNWYQLKPGRAPSLIISYDDERASGTPARFSGSHSGSTATLTISNVVPADEADYFCQVWDSKYEEIYFG

SEQ ID NO: 592 - protein, 100 aa, Artificial Sequence
  Synthetic: LN02_M-L102
SYVLGQSSSMSVAPGQTAKISCWGYYMGTKAVNWYQLKPGRAPSLIISYDDERASGTPARFSGSHSGSTATLTISNVVPADEADYFCQVWDSKYEEIYFG

SEQ ID NO: 593 - protein, 100 aa, Artificial Sequence
  Synthetic: LN02_M-L103
SYVLGQSSSMSVAPGQTAKISCWGYYMGTKPVHWYQLKPGRAPSLIISYDDERASGTPARFSGSHSGSTATLTISNVVPADEADYFCQVWDSKYEEIYFG

SEQ ID NO: 594 - protein, 100 aa, Artificial Sequence
  Synthetic: LN02_M-L104
SYVLGQSSSMSVAPGQTAKISCWGYYMGTKPVQWYQLKPGRAPSLIISYDDERASGTPARFSGSHSGSTATLTISNVVPADEADYFCQVWDSKYEEIYFG

SEQ ID NO: 595 - protein, 100 aa, Artificial Sequence
  Synthetic: LN02_M-L105
SYVLGQSSSMSVAPGQTAKISCWGYYMGTKPVNWYQLKPGRAPSLIISDDDERASGTPARFSGSHSGSTATLTISNVVPADEADYFCQVWDSKYEEIYFG

SEQ ID NO: 596 - protein, 100 aa, Artificial Sequence
  Synthetic: LN02_M-L106
SYVLGQSSSMSVAPGQTAKISCWGYYMGTKPVNWYQLKPGRAPSLIISYDSERASGTPARFSGSHSGSTATLTISNVVPADEADYFCQVWDSKYEEIYFG

SEQ ID NO: 597 - protein, 100 aa, Artificial Sequence; identical to SEQ ID NO: 11
  Synthetic: LN02_M-L107

SEQ ID NO: 598 - protein, 100 aa, Artificial Sequence
  Synthetic: LN02_M-L108
SYVLGQSSSMSVAPGQTAKISCWGYYMGTKPVNWYQLKPGRAPSLIISYDDQRASGTPARFSGSHSGSTATLTISNVVPADEADYFCQVWDSKYEEIYFG

SEQ ID NO: 599 - protein, 100 aa, Artificial Sequence
  Synthetic: LN02_M-L109
SYVLGQSSSMSVAPGQTAKISCWGYYMGTKPVNWYQLKPGRAPSLIISYDDEKASGTPARFSGSHSGSTATLTISNVVPADEADYFCQVWDSKYEEIYFG

SEQ ID NO: 600 - protein, 100 aa, Artificial Sequence; identical to SEQ ID NO: 47
  Synthetic: LN02_M-L110

SEQ ID NO: 601 - protein, 100 aa, Artificial Sequence
  Synthetic: LN02_M-L111
SYVLGQSSSMSVAPGQTAKISCWGYYMGTKPVNWYQLKPGRAPSLIISYDDERDSGTPARFSGSHSGSTATLTISNVVPADEADYFCQVWDSKYEEIYFG

SEQ ID NO: 602 - protein, 100 aa, Artificial Sequence
  Synthetic: LN02_M-L112
SYVLGQSSSMSVAPGQTAKISCWGYYMGTKPVNWYQLKPGRAPSLIISYDDERSSGTPARFSGSHSGSTATLTISNVVPADEADYFCQVWDSKYEEIYFG

SEQ ID NO: 603 - protein, 100 aa, Artificial Sequence
  Synthetic: LN02_M-L113
SYVLGQSSSMSVAPGQTAKISCWGYYMGTKPVNWYQLKPGRAPSLIISYDDERESGTPARFSGSHSGSTATLTISNVVPADEADYFCQVWDSKYEEIYFG

SEQ ID NO: 604 - protein, 100 aa, Artificial Sequence
  Synthetic: LN02_M-L114
SYVLGQSSSMSVAPGQTAKISCWGYYMGTKPVNWYQLKPGRAPSLIISYDDERHSGTPARFSGSHSGSTATLTISNVVPADEADYFCQVWDSKYEEIYFG

SEQ ID NO: 605 - protein, 100 aa, Artificial Sequence
  Synthetic: LN02_M-L115
SYVLGQSSSMSVAPGQTAKISCWGYYMGTKPVNWYQLKPGRAPSLIISYDDERQSGTPARFSGSHSGSTATLTISNVVPADEADYFCQVWDSKYEEIYFG

SEQ ID NO: 606 - protein, 100 aa, Artificial Sequence
  Synthetic: LN02_M-L116
SYVLGQSSSMSVAPGQTAKISCWGYYMGTKPVNWYQLKPGRAPSLIISYDDERNSGTPARFSGSHSGSTATLTISNVVPADEADYFCQVWDSKYEEIYFG

SEQ ID NO: 607 - protein, 100 aa, Artificial Sequence; identical to SEQ ID NO: 69
  Synthetic: LN02_M-L117

SEQ ID NO: 608 - protein, 100 aa, Artificial Sequence
  Synthetic: LN02_M-L118
SYVLGQSSSMSVAPGQTAKISCWGYYMGTKPVNWYQLKPGRAPSLIISYDDERASGTPARFSGSHSGSTATLTISNVVPADEADYFCQVWDSKSEEIYFG

SEQ ID NO: 609 - protein, 100 aa, Artificial Sequence
  Synthetic: LN02_M-L120
SYVLGQSSSMSVAPGQTAKISCWGYYMGTKPVNWYQLKPGRAPSLIISYDDERASGTPARFSGSHSGSTATLTISNVVPADEADYFCQVWDSKYEHIYFG

SEQ ID NO: 610 - protein, 100 aa, Artificial Sequence
  Synthetic: LN02_M-L121
SYVLGQSSSMSVAPGQTAKISCWGYYMGTKPVNWYQLKPGRAPSLIISYDDERASGTPARFSGSHSGSTATLTISNVVPADEADYFCQVWDSKYESIYFG

SEQ ID NO: 611 - protein, 100 aa, Artificial Sequence
  Synthetic: LN02_M-L122
SYVLGQSSSMSVAPGQTAKISCWGYYMGTKPVNWYQLKPGRAPSLIISYDDERASGTPARFSGSHSGSTATLTISNVVPADEADYFCQVWDSKYEQIYFG

SEQ ID NO: 612 - protein, 109 aa, Artificial Sequence
  Synthetic: LN02_M-L123
SYVLGQSSSMSVAPGQTAKISCWGYYMGTKPVNWYQLKPGRAPSLIISYDDERASGTPARFSGSHSGSTATLTISNVVPADEADYFCQVWDSKYEEIYFGGGTKLTVLG

SEQ ID NO: 613 - protein, 100 aa, Artificial Sequence
  Synthetic: LN02_M-L124
SYVLGQSSSMSVAPGQTAKISCWGYYMGTKPVNWYQLKPGRAPSLIISYDDERASGTPARFSGSHSGSTATLTISNVVPADEADYFCQVWDSYYREIYFG

SEQ ID NO: 614 - protein, 100 aa, Artificial Sequence
  Synthetic: LN02_M-L125
SYVLGQSSSMSVAPGQTAKISCWGYYMGTKPVNWYQLKPGRAPSLIISYDDERASGTPARFSGSHSGSTATLTISNVVPADEADYFCQVWDSYYHEIYFG

SEQ ID NO: 615 - protein, 100 aa, Artificial Sequence
  Synthetic: LN02_M-L126
SYVLGQSSSMSVAPGQTAKISCWGYYMGTKPVNWYQLKPGRAPSLIISYDDERASGTPARFSGSHSGSTATLTISNVVPADEADYFCQVWDSYYQEIYFG

SEQ ID NO: 616 - protein, 100 aa, Artificial Sequence
  Synthetic: LN02_M-L127
SYVLGQSSSMSVAPGQTAKISCWGYYMGTKPVNWYQLKPGRAPSLIISYDDERASGTPARFSGSHSGSTATLTISNVVPADEADYFCQVWDSYYKEIYFG

SEQ ID NO: 617 - protein, 100 aa, Artificial Sequence
  Synthetic: LN02_M-L128
SYVLGQSSSMSVAPGQTAKISCWGYYMGTKPVNWYQLKPGRAPSLIISYDDERASGTPARFSGSHSGSTATLTISNVVPADEADYFCQVWDQYYEEIYFG

SEQ ID NO: 618 - protein, 100 aa, Artificial Sequence
  Synthetic: LN02_M-L129
SYVLGQSSSMSVAPGQTAKISCWGYYMGTKPVNWYQLKPGRAPSLIISYDDERASGTPARFSGSHSGSTATLTISNVVPADEADYFCQVWDTYYEEIYFG

SEQ ID NO: 619 - protein, 100 aa, Artificial Sequence
  Synthetic: LN02_M-L130
SYVLGQSSSMSVAPGQTAKISCWGYYMGTKPVNWYQLKPGRAPSLIISYDDERASGTPARFSGSHSGSTATLTISNVVPADEADYFCQVWDHYYEEIYFG

SEQ ID NO: 620 - protein, 100 aa, Artificial Sequence
  Synthetic: LN02_M-L131
SYVLGQSSSMSVAPGQTAKISCWGYYMGTKPVNWYQLKPGRAPSLIISYDDERASGTPARFSGSHSGSTATLTISNVVPADEADYFCQVWDAYYEEIYFG

SEQ ID NO: 621 - protein, 100 aa, Artificial Sequence
  Synthetic: LN02_M-L132
SYVLGQSSSMSVAPGQTAKISCWGYYMGTKPVNWYQLKPGRAPSLIISYDDERASGTPARFSGSHSGSTATLTISNVVPADEADYFCQVWDQYYHEIYFG

SEQ ID NO: 622 - protein, 100 aa, Artificial Sequence
  Synthetic: LN02_M-L133
SYVLGQSSSMSVAPGQTAKISCWGYYMGTKPVNWYQLKPGRAPSLIISYDDERASGTPARFSGSHSGSTATLTISNVVPADEADYFCQVWDSYYEEVYFG

SEQ ID NO: 623 - protein, 100 aa, Artificial Sequence
  Synthetic: LN02_M-L134
SYVLGQSSSMSVAPGQTAKISCWGYYMGYYPVNWYQLKPGRAPSLIISYDDERASGTPARFSGSHSGSTATLTISNVVPADEADYFCQVWDSKYEEIYFG

SEQ ID NO: 624 - protein, 100 aa, Artificial Sequence
  Synthetic: LN02_M-L135
SYVLGQSSSMSVAPGQTAKISCWGYYMGYKPVNWYQLKPGRAPSLIITYDDERASGTPARFSGSHSGSTATLTISRVEPADEADYFCQVWDSYYEEIYFG

SEQ ID NO: 625 - protein, 100 aa, Artificial Sequence
  Synthetic: LN02_M-L136
SYVLTQSSSMSVAPGQTAKISCWGYYMGTKPVNWYQLKPGRAPSLIISYDDERASGTPARFSGSHSGSTATLTISNVVPADEADYFCQVWDSYYEEIYFG

SEQ ID NO: 626 - protein, 100 aa, Artificial Sequence
  Synthetic: LN02_M-L137
SYVLGQSSSMSVAPGQTAKISCWGYYMGTKPVNWYQLKPGRAPSLIISYDDERASGTPARFSGSYSGSTATLTISNVVPADEADYFCQVWDSYYEEIYFG

SEQ ID NO: 627 - protein, 100 aa, Artificial Sequence
  Synthetic: LN02_M-L138
SYVLGQSSSMSVAPGQTAKISCWGYYMGTKPVNWYQLKPGRAPSLIISYDDERASGTPARFSGSTSGSTATLTISNVVPADEADYFCQVWDSYYEEIYFG

SEQ ID NO: 628 - protein, 100 aa, Artificial Sequence
  Synthetic: LN02_M-L139
SYVLGQSSSMSVAPGQTAKISCWGYYMGTKPVNWYQLKPGRAPSLIISYDDERASGTPARFSGSKSGSTATLTISNVVPADEADYFCQVWDSYYEEIYFG

SEQ ID NO: 629 - protein, 100 aa, Artificial Sequence
  Synthetic: LN02_M-L140
SYVLGQSSSMSVAPGQTAKISCWGYYMGTKPVNWYQLKPGRAPSLIISYDDERASGTPARFSGSQSGSTATLTISNVVPADEADYFCQVWDSYYEEIYFG

SEQ ID NO: 630 - protein, 100 aa, Artificial Sequence
  Synthetic: LN02_M-L141
SYVLGQSSSMSVAPGQTAKISCWGYYMGTKPVNWYQLKPGRAPSLIISYDDERASGTPARFSGSSSGSTATLTISNVVPADEADYFCQVWDSYYEEIYFG

SEQ ID NO: 631 - protein, 100 aa, Artificial Sequence
  Synthetic: LN02_M-L142
SYVLGQSSSMSVAPGQTAKISCWGYYMGTKPVHWYQLKPGRAPSLIISYDDERASGTPARFSGSHSGSTATLTISNVVPADEADYFCQVWDSYYKEIYFG

SEQ ID NO: 632 - protein, 100 aa, Artificial Sequence
  Synthetic: LN02_M-L143
SYVLGQSSSMSVAPGQTAKISCWGYYMGTKPVQWYQLKPGRAPSLIISYDDERASGTPARFSGSHSGSTATLTISNVVPADEADYFCQVWDSYYKEIYFG

SEQ ID NO: 633 - protein, 100 aa, Artificial Sequence
  Synthetic: LN02_M-L144
SYVLGQSSSMSVAPGQTAKISCWGYYMGTKPVAWYQLKPGRAPSLIISYDDERASGTPARFSGSHSGSTATLTISNVVPADEADYFCQVWDSYYKEIYFG

SEQ ID NO: 634 - protein, 100 aa, Artificial Sequence
  Synthetic: LN02_M-L145
SYVLGQSSSMSVAPGQTAKISCWGYYMGTKPVSWYQLKPGRAPSLIISYDDERASGTPARFSGSHSGSTATLTISNVVPADEADYFCQVWDSYYKEIYFG

SEQ ID NO: 635 - protein, 100 aa, Artificial Sequence
  Synthetic: LN02_M-L146
SYVLGQSSSMSVAPGQTAKISCWGYYMGTKPVNWYQQKPGRAPSLIISYDDERASGTPARFSGSHSGSTATLTISNVVPADEADYFCQVWDSYYKEIYFG

SEQ ID NO: 636 - protein, 100 aa, Artificial Sequence
  Synthetic: LN02_M-L147
SYVLGQSSSMSVAPGQTAKISCWGYYMGTKPVNWYQHKPGRAPSLIISYDDERASGTPARFSGSHSGSTATLTISNVVPADEADYFCQVWDSYYKEIYFG

SEQ ID NO: 637 - protein, 100 aa, Artificial Sequence
  Synthetic: LN02_M-L148
SYVLGQSSSMSVAPGQTAKISCWGYYMGTKPVNWYQLKPGRAPVLIISYDDERASGTPARFSGSHSGSTATLTISNVVPADEADYFCQVWDSYYKEIYFG

SEQ ID NO: 638 - protein, 100 aa, Artificial Sequence
  Synthetic: LN02_M-L149
SYVLGQSSSMSVAPGQTAKISCWGYYMGTKPVNWYQHKPGRAPVLIISYDDERASGTPARFSGSHSGSTATLTISNVVPADEADYFCQVWDSYYKEIYFG

SEQ ID NO: 639 - protein, 100 aa, Artificial Sequence
  Synthetic: LN02_M-L150
SYVLGQSSSMSVAPGQTAKISCWGYYMGTKPVNWYQLKPGRAPSLIISYDDERASGVPARFSGSHSGSTATLTISNVVPADEADYFCQVWDSYYKEIYFG

SEQ ID NO: 640 - protein, 100 aa, Artificial Sequence
  Synthetic: LN02_M-L151
SYVLGQSSSMSVAPGQTAKISCWGYYMGTKPVNWYQLKPGRAPSLIISYDDERASGIPARFSGSHSGSTATLTISNVVPADEADYFCQVWDSYYKEIYFG

SEQ ID NO: 641 - protein, 100 aa, Artificial Sequence
  Synthetic: LN02_M-L152
SYVLGQSSSMSVAPGQTAKISCWGYYMGTKPVNWYQLKPGRAPSLIISYDDERASGTPERFSGSHSGSTATLTISNVVPADEADYFCQVWDSYYKEIYFG

SEQ ID NO: 642 - protein, 100 aa, Artificial Sequence
  Synthetic: LN02_M-L153
SYVLGQSSSMSVAPGQTAKISCWGYYMGTKPVNWYQLKPGRAPSLIISYDDERASGTPTRFSGSHSGSTATLTISNVVPADEADYFCQVWDSYYKEIYFG

SEQ ID NO: 643 - protein, 100 aa, Artificial Sequence
  Synthetic: LN02_M-L154
SYVLGQSSSMSVAPGQTAKISCWGYYMGTKPVNWYQLKPGRAPSLIISYDDERNSGVPERFSGSHSGSTATLTISNVVPADEADYFCQVWDSYYKEIYFG

SEQ ID NO: 644 - protein, 100 aa, Artificial Sequence
  Synthetic: LN02_M-L155
SYVLGQSSSMSVAPGQTAKISCWGYYMGTKPVNWYQLKPGRAPSLIISYDDERASGTPERFSGSHSGSTATLTISRVVPADEADYFCQVWDSYYKEIYFG

SEQ ID NO: 645 - protein, 100 aa, Artificial Sequence
  Synthetic: LN02_M-L156
SYVLGQSSSMSVAPGQTAKISCWGYYMGTKPVNWYQLKPGRAPSLIISYDDERASGTPARFSGSHSGSTATLTISSVVPADEADYFCQVWDSYYKEIYFG

SEQ ID NO: 646 - protein, 100 aa, Artificial Sequence
  Synthetic: LN02_M-L157
SYVLGQSSSMSVAPGQTAKISCWGYYMGTKPVNWYQLKPGRAPSLIISYDDERASGTPARFSGSHSGSTATLTISNVVPEDEADYFCQVWDSYYKEIYFG

SEQ ID NO: 647 - protein, 100 aa, Artificial Sequence
  Synthetic: LN02_M-L158
SYVLGQSSSMSVAPGQTAKISCWGYYMGTKPVNWYQLKPGRAPSLIISYDDERASGTPARFSGSHSGSTATLTISNVEAGDEADYFCQVWDSYYKEIYFG

SEQ ID NO: 648 - protein, 109 aa, Artificial Sequence
  Synthetic: LN02_M-L159
SYVLGQSSSMSVAPGQTAKISCWGYYMGTKPVNWYQLKPGRAPSLIISYDDERASGTPARFSGSHSGSTATLTISNVVPADEADYFCQVWDSYYKEIYFGGGTKLTVLG

SEQ ID NO: 649 - protein, 109 aa, Artificial Sequence
  Synthetic: LN02_M-L160
SYVLGQSSSMSVAPGQTAKISCWGYYMGTKPVNWYQLKPGRAPSLIISYDDERASGTPARFSGSHSGSTATLTISNVVPADEADYFCQVWDSYYKEIYFGGGTTLTVLG

SEQ ID NO: 650 - protein, 100 aa, Artificial Sequence
  Synthetic: LN02_M-L161
SYVLGQSSSMSVAPGQTAKISCWGYYMGTKPVNWYQLKPGRAPSLIISMDDERASGTPARFSGSHSGSTATLTISNVVPADEADYFCQVWDSYYKEIYFG

SEQ ID NO: 651 - protein, 100 aa, Artificial Sequence
  Synthetic: LN02_M-L162
SYVLGQSSSMSVAPGQTAKISCWGYYMGTKPVNWYQLKPGRAPSLIISQDDERASGTPARFSGSHSGSTATLTISNVVPADEADYFCQVWDSYYKEIYFG

SEQ ID NO: 652 - protein, 100 aa, Artificial Sequence
  Synthetic: LN02_M-L163
SYVLGQSSSMSVAPGQTAKISCWGYYMGTKPVNWYQLKPGRAPSLIISEDDERASGTPARFSGSHSGSTATLTISNVVPADEADYFCQVWDSYYKEIYFG

SEQ ID NO: 653 - protein, 100 aa, Artificial Sequence
  Synthetic: LN02_M-L164
SYVLGQSSSMSVAPGQTAKISCWGYYMGTKPVNWYQLKPGRAPSLIISRDDERASGTPARFSGSHSGSTATLTISNVVPADEADYFCQVWDSYYKEIYFG

SEQ ID NO: 654 - protein, 100 aa, Artificial Sequence
  Synthetic: LN02_M-L165
SYVLGQSSSMSVAPGQTAKISCWGYYMGTKPVNWYQLKPGRAPSLIISHDDERASGTPARFSGSHSGSTATLTISNVVPADEADYFCQVWDSYYKEIYFG

SEQ ID NO: 655 - protein, 100 aa, Artificial Sequence
  Synthetic: LN02_M-L166
SYVLGQSSSMSVAPGQTAKISCWGYYMGTKPVNWYQLKPGRAPSLIISYDDSRASGTPARFSGSHSGSTATLTISNVVPADEADYFCQVWDSYYKEIYFG

SEQ ID NO: 656 - protein, 100 aa, Artificial Sequence
  Synthetic: LN02_M-L167
SYVLGQSSSMSVAPGQTAKISCWGYYMGTKPVNWYQLKPGRAPSLIISYDDTRASGTPARFSGSHSGSTATLTISNVVPADEADYFCQVWDSYYKEIYFG

SEQ ID NO: 657 - protein, 100 aa, Artificial Sequence
  Synthetic: LN02_M-L168
SYVLGQSSSMSVAPGQTAKISCWGYYMGTKPVNWYQLKPGRAPSLIISYDDERNSGTPARFSGSHSGSTATLTISNVVPADEADYFCQVWDSYYKEIYFG

SEQ ID NO: 658 - protein, 100 aa, Artificial Sequence
  Synthetic: LN02_M-L169
SYVLGQSSSMSVAPGQTAKISCWGYYMGTKPVNWYQLKPGRAPSLIISYNDERASGTPARFSGSHSGSTATLTISNVVPADEADYFCQVWDSYYKEIYFG

SEQ ID NO: 659 - protein, 100 aa, Artificial Sequence
  Synthetic: LN02_M-L170
SYVLGQSSSMSVAPGQTAKISCWGYYMGTKPVNWYQLKPGRAPSLIISYDDERANGTPARFSGSHSGSTATLTISNVVPADEADYFCQVWDSYYKEIYFG

SEQ ID NO: 660 - protein, 101 aa, Artificial Sequence
  Synthetic: LN02_M-L171
SYVLGQSSSMSVAPGQTAKISCWGYYMGTKPVNWYQLKPGRAPSLIISYDDERASGTPARFSGSHSGSTATLTISNVVPADEADYFCQVWDSGYYKEIYFG

SEQ ID NO: 661 - protein, 100 aa, Artificial Sequence
  Synthetic: LN02_M-L172
SYVLGQSSSMSVAPGQTAKISCWGYYMGSKPVNWYQLKPGRAPSLIISYDDERDSGTPARFSGSHSGSTATLTISNVVPADEADYFCQVWDSEYEEIYFG

SEQ ID NO: 662 - protein, 100 aa, Artificial Sequence
  Synthetic: LN02_M-L173
SYVLGQSSSMSVAPGQTAKISCWGYYMGTKPVNWYQLKPGRAPSLIISYDDERASGTPARFSGSHSGSTATLTISNVVPADEADYFCQVWDSYYEEAYFG

SEQ ID NO: 663 - protein, 100 aa, Artificial Sequence
  Synthetic: LN02_M-L174
SYVLGQSSSMSVAPGQTAKISCWGYYMGTKPVNWYQLKPGRAPSLIISYDDERASGTPARFSGSHSGSTATLTISNVVPADEADYFCQVWDSYYEEMYFG

SEQ ID NO: 664 - protein, 100 aa, Artificial Sequence
  Synthetic: LN02_M-L175
SYVLGQSSSMSVAPGQTAKISCWGYYMGTKPVNWYQLKPGRAPSLIISYDDERASGTPARFSGSHSGSTATLTISNVVPADEADYFCQVWDSYYEEFYFG

SEQ ID NO: 665 - protein, 100 aa, Artificial Sequence
  Synthetic: LN02_M-L176
SYVLGQSSSMSVAPGQTAKISCWGYYMGTKPVNWYQLKPGRAPSLIISYDDERASGTPARFSGSHSGSTATLTISNVVPADEADYFCQVWDSYYEDIYFG

SEQ ID NO: 666 - protein, 100 aa, Artificial Sequence
  Synthetic: LN02_M-L177
SYVLGQSSSMSVAPGQTAKISCWGYYMGTKPVNWYQLKPGRAPSLIISYDDERASGTPARFSGSHSGSTATLTISNVVPADEADYFCQVWDSYYEQIYFG

SEQ ID NO: 667 - protein, 100 aa, Artificial Sequence
  Synthetic: LN02_M-L178
SYVLGQSSSMSVAPGQTAKISCWGYYMGTKPVNWYQLKPGRAPSLIISYDDERASGTPARFSGSHSGSTATLTISNVVPADEADYFCQVWDSYYRQIYFG

SEQ ID NO: 668 - protein, 100 aa, Artificial Sequence
  Synthetic: LN02_M-L179
SYVLGQSSSMSVAPGQTAKISCWGYYMGTKPVNWYQLKPGRAPSLIISYDDERASGTPARFSGSHSGSTATLTISNVVPADEADYFCQVWDSYYREVYFG

SEQ ID NO: 669 - protein, 100 aa, Artificial Sequence
  Synthetic: LN02_M-L180
SYVLGQSSSMSVAPGQTAKISCWGYYMGTKPVNWYQLKPGRAPSLIISYDDERASGTPARFSGSHSGSTATLTISNVVPADEADYFCQVWDSYYQEVYFG

SEQ ID NO: 670 - protein, 100 aa, Artificial Sequence
  Synthetic: LN02_M-L181
SYVLGQSSSMSVAPGQTAKISCWGYYMGTKPVNWYQLKPGRAPSLIISYDDERASGTPARFSGSHSGSTATLTISNVVPADEADYFCQVWDSYYEQVYFG

SEQ ID NO: 671 - protein, 100 aa, Artificial Sequence
  Synthetic: LN02_M-L182
SYVLGQSSSMSVAPGQTAKISCWGYYMGTKPVNWYQLKPGRAPSLIISYDDERASGTPARFSGSHSGSTATLTISNVVPADEADYFCQVWDSYYREAYFG

SEQ ID NO: 672 - protein, 100 aa, Artificial Sequence
  Synthetic: LN02_M-L183
SYVLGQSSSMSVAPGQTAKISCWGYYMGTKPVNWYQLKPGRAPSLIISYDDERASGTPARFSGSHSGSTATLTISNVVPADEADYFCQVWNSYYEEIYFG

SEQ ID NO: 673 - protein, 100 aa, Artificial Sequence
  Synthetic: LN02_M-L184
SYVLGQSSSMSVAPGQTAKISCWGYYMGTKPVNWYQLKPGRAPSLIISYDDERASGTPARFSGSHSGSTATLTISNVVPADEADYFCQVWNSYYREIYFG

SEQ ID NO: 674 - protein, 100 aa, Artificial Sequence
  Synthetic: LN02_M-L185
SYVLGQSSSMSVAPGQTAKISCWGYYMGTKPVNWYQLKPGRAPSLIISYDDERASGTPARFSGSHSGSTATLTISNVVPADEADYFCQVWQSYYQEIYFG

SEQ ID NO: 675 - protein, 101 aa, Artificial Sequence
  Synthetic: LN02_M-L186
SYVLGQSSSMSVAPGQTAKISCWGYYMGTKPVNWYQLKPGRAPSLIISYDDERASGTPARFSGSHSGSTATLTISNVVPADEADYFCQVWDSYYEEIYGFG

SEQ ID NO: 676 - protein, 101 aa, Artificial Sequence
  Synthetic: LN02_M-L187
SYVLGQSSSMSVAPGQTAKISCWGYYMGTKPVNWYQLKPGRAPSLIISYDDERASGTPARFSGSHSGSTATLTISNVVPADEADYFCQVWDSYYEEIYPFG

SEQ ID NO: 677 - protein, 101 aa, Artificial Sequence
  Synthetic: LN02_M-L188
SYVLGQSSSMSVAPGQTAKISCWGYYMGTKPVNWYQLKPGRAPSLIISYDDERASGTPARFSGSHSGSTATLTISNVVPADEADYFCQVWDSYYEEIGYFG

SEQ ID NO: 678 - protein, 101 aa, Artificial Sequence
  Synthetic: LN02_M-L189
SYVLGQSSSMSVAPGQTAKISCWGYYMGTKPVNWYQLKPGRAPSLIISYDDERASGTPARFSGSHSGSTATLTISNVVPADEADYFCQVWDSYYEEIPYFG

SEQ ID NO: 679 - protein, 101 aa, Artificial Sequence
  Synthetic: LN02_M-L190
SYVLGQSSSMSVAPGQTAKISCWGYYMGTKPVNWYQLKPGRAPSLIISYDDERASGTPARFSGSHSGSTATLTISNVVPADEADYFCQVWISSDRIEIYFG

SEQ ID NO: 680 - protein, 101 aa, Artificial Sequence
  Synthetic: LN02_M-L191
SYVLGQSSSMSVAPGQTAKISCWGYYMGTKPVNWYQLKPGRAPSLIISYDDERASGTPARFSGSHSGSTATLTISNVVPADEADYFCQVYISSDRIEIYFG

SEQ ID NO: 681 - protein, 100 aa, Artificial Sequence; identical to SEQ ID NO: 662
  Synthetic: LN02_M-L173

SEQ ID NO: 682 - protein, 100 aa, Artificial Sequence; identical to SEQ ID NO: 663
  Synthetic: LN02_M-L174

SEQ ID NO: 683 - protein, 100 aa, Artificial Sequence; identical to SEQ ID NO: 664
  Synthetic: LN02_M-L175

SEQ ID NO: 684 - protein, 100 aa, Artificial Sequence; identical to SEQ ID NO: 665
  Synthetic: LN02_M-L176

SEQ ID NO: 685 - protein, 100 aa, Artificial Sequence; identical to SEQ ID NO: 666
  Synthetic: LN02_M-L177

SEQ ID NO: 686 - protein, 100 aa, Artificial Sequence; identical to SEQ ID NO: 667
  Synthetic: LN02_M-L178

SEQ ID NO: 687 - protein, 100 aa, Artificial Sequence; identical to SEQ ID NO: 668
  Synthetic: LN02_M-L179

SEQ ID NO: 688 - protein, 100 aa, Artificial Sequence; identical to SEQ ID NO: 669
  Synthetic: LN02_M-L180

SEQ ID NO: 689 - protein, 100 aa, Artificial Sequence; identical to SEQ ID NO: 670
  Synthetic: LN02_M-L181

SEQ ID NO: 690 - protein, 100 aa, Artificial Sequence; identical to SEQ ID NO: 671
  Synthetic: LN02_M-L182

SEQ ID NO: 691 - protein, 100 aa, Artificial Sequence; identical to SEQ ID NO: 672
  Synthetic: LN02_M-L183

SEQ ID NO: 692 - protein, 100 aa, Artificial Sequence; identical to SEQ ID NO: 673
  Synthetic: LN02_M-L184

SEQ ID NO: 693 - protein, 100 aa, Artificial Sequence; identical to SEQ ID NO: 674
  Synthetic: LN02_M-L185

SEQ ID NO: 694 - protein, 101 aa, Artificial Sequence; identical to SEQ ID NO: 675
  Synthetic: LN02_M-L186

SEQ ID NO: 695 - protein, 101 aa, Artificial Sequence; identical to SEQ ID NO: 676
  Synthetic: LN02_M-L187

SEQ ID NO: 696 - protein, 101 aa, Artificial Sequence; identical to SEQ ID NO: 677
  Synthetic: LN02_M-L188

SEQ ID NO: 697 - protein, 101 aa, Artificial Sequence; identical to SEQ ID NO: 678
  Synthetic: LN02_M-L189

SEQ ID NO: 698 - protein, 101 aa, Artificial Sequence; identical to SEQ ID NO: 679
  Synthetic: LN02_M-L190

SEQ ID NO: 699 - protein, 101 aa, Artificial Sequence; identical to SEQ ID NO: 680
  Synthetic: LN02_M-L191

SEQ ID NO: 700 - protein, 100 aa, Artificial Sequence
  Synthetic: LN02_M-L119
SYVLGQSSSMSVAPGQTAKISCWGYYMGTKPVNWYQLKPGRAPSLIISYDDERASGTPARFSGSHSGSTATLTISNVVPADEADYFCQVWDSKYQEIYFG

What is claimed is:

1. A binding agent comprising:
a) at least one CDR illustrated in FIG. 1, FIGS. 6A through 6E, FIGS. 7A-7E, or FIGS. 8A-F;
b) an amino acid sequence selected from the group consisting of SEQ ID NOS. 3-92 or 491-699;
c) an amino acid sequence selected from the group consisting of SEQ ID NOS. 95-233 or 248-482;
d) a variable heavy chain region comprising MH01 (SEQ ID NO. 95), MH16 (SEQ ID NO. 110), MH22 (SEQ ID NO. 116), MH26 (SEQ ID NO. 120), MH30 (SEQ ID NO. 124), MH32 (SEQ ID NO. 126), MH35 (SEQ ID NO. 129), MH36 (SEQ ID NO. 130), MH37 (SEQ ID NO. 131), MH43 (SEQ ID NO. 136), MH44 (SEQ ID NO. 137), MH48 (SEQ ID NO. 141), MH49 (SEQ ID NO. 142), MH50 (SEQ ID NO. 143), MH51 (SEQ ID NO. 144), MH53 (SEQ ID NO. 146), MH59 (SEQ ID NO. 151), MH61 (SEQ ID NO. 153), MH64 (SEQ ID NO. 156), MH68 (SEQ ID NO. 159), MH73 (SEQ ID NO. 163), MH84 (SEQ ID NO. 174), MH89 (SEQ ID NO. 177), MH91 (SEQ ID NO. 178), MH92 (SEQ ID NO. 179), MH106 (SEQ ID NO. 193), MH107 (SEQ ID NO. 194), MH108 (SEQ ID NO. 195), MH111 (SEQ ID NO. 198), MH112 (SEQ ID NO. 199), MH115 (SEQ ID NO. 202), MH119 (SEQ ID NO. 206), MH120 (SEQ ID NO. 207), MH124 (SEQ ID NO. 211), MH 131 (SEQ ID NO. 218), MH135 (SEQ ID NO. 222), MH136 (SEQ ID NO. 223), MH138 (SEQ ID NO. 225), and/or MH146 (SEQ ID NO. 232);
e) a variable light chain region comprising ML01 (SEQ ID NO. 3), ML02 (SEQ ID NO. 4), ML05 (SEQ ID NO. 7), ML08 (SEQ ID NO. 10), ML10 (SEQ ID NO. 12), ML11 (SEQ ID NO. 13), ML12 (SEQ ID NO. 14), ML31 (SEQ ID NO. 31), ML32 (SEQ ID NO. 32), ML44 (SEQ ID NO. 42), ML49 (SEQ ID NO. 47), ML51 (SEQ ID NO. 48), ML52 (SEQ ID NO. 49), ML60 (SEQ ID NO. 56), ML71 (SEQ ID NO. 66), ML73 (SEQ ID NO. 68), ML74 (SEQ ID NO. 69), ML79 (SEQ ID NO. 74), ML84 (SEQ ID NO. 79), ML85 (SEQ ID NO. 80), ML92 (SEQ ID NO. 87), or ML94 (SEQ ID NO. 89);
f) a combination CDRs, amino acid sequences, variable heavy chain regions, and/or variable light chain regions of a), b), c), d), or e);
g) a combination of a LN02M variable light chain and a LN02M variable heavy chain described in any of Tables 4, 9, 10A through 10C, 11, 12A through 12D, 13A through 13D, or 14;
h) a combination of a LN02M variable light chain comprising ML01 (SEQ ID NO. 3) with LN02M variable heavy chain comprising MH02 (SEQ ID NO. 96), MH04 (SEQ ID NO. 98), MH22 (SEQ ID NO. 116), MH23 (SEQ ID NO. 117), MH30 (SEQ ID NO. 124), MH31 (SEQ ID NO. 125), MH35 (SEQ ID NO. 129), MH36 (SEQ ID NO. 130), and/or MH37 (SEQ ID NO. 131);
i) a combination of a LN02M variable light chain ML12 (SEQ ID NO. 14) with an LN02M variable heavy chain comprising MH02 (SEQ ID NO. 96), MH04 (SEQ ID NO. 98), MH22 (SEQ ID NO. 116), MH23 (SEQ ID NO. 117) MH30 (SEQ ID NO. 124), MH31 (SEQ ID NO. 125), MH35 (SEQ ID NO. 129), MH36 (SEQ ID NO. 130), and/or MH37 (SEQ ID NO. 131);
j) a combination of a LN02M variable light chain ML23 (SEQ ID NO. 24) with LN02M variable heavy chain comprising MH31 (SEQ ID NO. 125), MH43 (SEQ ID NO. 136), MH48 (SEQ ID NO. 141), and MH51 (SEQ ID NO. 144);
k) a combination of a LN02M variable light chain ML30 (SEQ ID NO. 30) with LN02M variable heavy chain comprising MH31 (SEQ ID NO. 125), MH43 (SEQ ID NO. 136), MH48 (SEQ ID NO. 141), or MH51 (SEQ ID NO. 144);
l) a combination of a LN02M variable light chain ML31 (SEQ ID NO. 31) with LN02M variable heavy chain comprising MH02 (SEQ ID NO. 96), MH04 (SEQ ID NO. 98), MH22 (SEQ ID NO. 116), MH23 (SEQ ID NO. 117), MH30 (SEQ ID NO. 124), MH31 (SEQ ID NO. 125), MH35 (SEQ ID NO. 129), MH36 (SEQ ID NO. 130), MH37 (SEQ ID NO. 131), MH43 (SEQ ID NO. 136), MH48 (SEQ ID NO. 141), or MH51 (SEQ ID NO. 144);
m) a combination of a LN02M variable light chain ML32 (SEQ ID NO. 32) with LN02M variable heavy chain MH31 (SEQ ID NO. 125);
n) a combination of a LN02M variable light chain ML85 (SEQ ID NO. 80) with a LN02M variable heavy chain comprising MH31 (SEQ ID NO. 125), MH35 (SEQ ID NO. 129), MH43 (SEQ ID NO. 136), MH49 (SEQ ID NO. 142), MH60 (SEQ ID NO. 152), MH76 (SEQ ID NO. 166), MH111 (SEQ ID NO. 198), or MH112 (SEQ ID NO. 199);
o) a combination of light and heavy chain substitutions shown in Table 9, optionally selected from the group consisting of the binding agents ML085 comprising the K93Y substitution on the light chain and wild-type LN02 heavy chain; Mx152 comprising the comprising the K93Y and E95Q substitutions to wild-type LN02 on the light chain and the S19H substitution to wild-type LN02 on the heavy chain; MX067 comprising the K93Y substitution to wild-type LN02 on the light chain and the S19H substitution to wild-type LN02 on the heavy chain; MX129 comprising the K93Y and T29S substitutions to wild-type LN02 on the light chain and the S19H substitution to wild-type LN02 on the heavy chain; MX130 comprising the K93Y and T29S substitutions to wild-type LN02 on the light chain and the T21Y substitution to wild-type LN02 heavy chain; ML126 comprising the K93Y and E95Q substitutions to wild-type LN02 on the light chain and the wild-type LN02 heavy chain; Mx175 comprising the K93Y and 197V substitutions to wild-type LN02 on the light chain and the S40A, Q42R, and T44G substitutions to wild-type LN02 on the heavy chain; Mx176 comprising the K93Y and 197V substitutions to wild-type LN02 on the light chain and the S40P, Q42R, G43K, and T44G substitutions to wild-type LN02 on the heavy chain; and, Mx181 comprising the K93Y and 197V substitutions to wild-type LN02 on the light chain and the S40P, Q42R, G43K, and T44G substitutions to wild-type LN02 on the heavy chain; and,
p) and conservatively substituted variant of a) through o); or,
a binding agent, preferably an antibody, including any of a) through p) above, exhibiting at least a 2-fold improvement in neutralization activity compared to LN02 and an equivalent or improved potency compared to ML085.

2. The binding agent of claim 1 wherein the binding agent neutralizes human immunodeficiency virus (HIV) in an in vitro HIV neutralization assay and/or in vivo.

3. The binding agent of claim 1 or 2 wherein the binding agent exhibits neutralization of HIV-1 pseudoviruses BJOX (CRF07_BC), CE1176, TRO.11 (B), X1632 (G), CH119 (CRF07_BC), CNE55 (CRF01_AE), 25710 (C), CD0217(C) at a concentration is from 10²−10° ug/ml, or between 10⁰-10¹ μg/ml.

4. The binding agent of claim 2 or 3 wherein the percent neutralization is at least about 50%.

5. The binding agent of any one of claims 1-4 wherein the binding agent neutralizes a majority of the HIV-1 pseudoviruses tested at an IC₅₀ or IC₈₀ of less than 25 μg/ml.

6. The binding agent of any one of claims 1-5 that is an antibody.

7. The binding agent of claim 6 that is an isolated monoclonal antibody.

8. The binding agent of claim 6 wherein the monoclonal antibody is a human monoclonal antibody.

9. The binding agent of claim 7 or 8 wherein the antibody isotype is IgG1 or IgG3.

10. The binding agent of claim 1 comprising at least one heavy chain CDR amino acid sequence illustrated in FIG. 1 and/or described in any of SEQ ID NOS. 95-233; and/or a conservatively substituted variant thereof.

11. The binding agent of claim 1 comprising at least one light chain CDR amino acid sequence in FIG. 1 and/or described in any of SEQ ID NOS. 3-92; and/or a conservatively substituted variant thereof.

12. The binding agent of claim 1 comprising at least one variable chain amino acid sequence selected from the group consisting of SEQ ID NOS. 3-92 and/or 95-233; and/or a conservatively substituted variant thereof.

13. The binding agent of any one of claims 1-12 derived from a human antibody, human IgG, human IgG1, human IgG2, human IgG3, human IgG4, human IgM, human IgA, human IgA1, human IgA2, human IgD, human IgE, canine antibody, canine IgGA, canine IgGB, canine IgGC, canine IgGD, chicken antibody, chicken IgA, chicken IgD, chicken IgE, chicken IgG, chicken IgM, chicken IgY, goat antibody, goat IgG, mouse antibody, mouse IgG, pig antibody, and rat antibody.

14. A derivative of a binding agent of any one of claims 1-13.

15. The derivative of claim 14 selected from the group consisting of an F_{ab}, F_{ab2}, Fab′ single chain antibody, Fᵥ, single chain, mono-specific antibody, bispecific antibody, trimeric antibody, multi-specific antibody, multivalent antibody, chimeric antibody, canine-human chimeric antibody, canine-mouse chimeric antibody, antibody comprising a canine Fc, humanized antibody, human antibody, caninized antibody, CDR-grafted antibody, shark antibody, nanobody, and camelid antibody.

16. The binding agent or derivative of any one of claims 1-15 comprising at least a least a first and second specificity, the first being against gp41 and the second being against a different antigen.

17. The binding agent or derivative of any one of claims 1-16 comprising a detectable label fixably attached thereto.

18. The binding agent of claim 17 wherein the detectable label is selected from the group consisting of fluorescein, DyLight, Cy3, Cy5, FITC, HiLyte Fluor 555, HiLyte Fluor 647, 5-carboxy-2,7-dichlorofluorescein, 5-carboxyfluorescein, 5-FAM, hydroxy tryptamine, 5-hydroxy tryptamine (5-HAT), 6-carboxyfluorescein (6-FAM), FITC, 6-carboxy-1,4-dichloro-2′,7′-dichlorofluorescein (TET), 6-carboxy-1,4-dichloro-2′,4′,5′,7′-tetra-chlorofluorescein (HEX), 6-carboxy-4′,5′-dichloro-2′,7′-dimethoxyfluorescein (6-JOE), an Alexa fluor, Alexa fluor 350, Alexa fluor 405, Alexa fluor 430, Alexa fluor 488, Alexa fluor 500, Alexa fluor 514, Alexa fluor 532, Alexa fluor 546, Alexa fluor 555, Alexa fluor 568, Alexa fluor 594, Alexa fluor 610, Alexa fluor 633, Alexa fluor 635, Alexa fluor 647, Alexa fluor 660, Alexa fluor 680, Alexa fluor 700, Alexa fluor 750, a BODIPY fluorophores, BODIPY 492/515, BODIPY 493/503, BODIPY 500/510, BODIPY 505/515, BODIPY 530/550, BODIPY 542/563, BODIPY 558/568, BODIPY 564/570, BODIPY 576/589, BODIPY 581/591, BODIPY 630/650-X, BODIPY 650/665-X, BODIPY 665/676, FL, FL ATP, FI-Ceramide, R6G SE, TMR, TMR-X conjugate, TMR-X, SE, TR, TR ATP, TR-X SE, a rhodamine, rhodamine 110, rhodamine 123, rhodamine B, rhodamine B 200, rhodamine BB, rhodamine BG, rhodamine B extra, 5-carboxytetramethylrhodamine (5-TAMRA), 5 GLD, 6-carboxyrhodamine 6G, Lissamine, Lissamine Rhodamine B, Phallicidine, Phalloidine, rhodamine red, Rhod-2, 6-carboxy-X-rhodamine (ROX), carboxy-X-rhodamine (5-ROX), Sulphorhodamine B can C, Sulphorhodamine G Extra, 6-carboxytetramethylrhodamine (TAMRA), tetramethylrhodamine (TRITC), rhodamine WT, Texas Red, and Texas Red-X.

19. The binding agent or derivative of any one of claims 1-18 or derivative thereof comprising an effector moiety fixably attached thereto.

20. The binding agent or derivative of claim 19 wherein the effector moiety is selected from the group consisting of a cytotoxic drug, toxin, diphtheria A chain, exotoxin A chain, ricin A chain, abrin A chain, curcin, crotin, phenomycin, enomycin, and radiochemical.

21. An isolated polynucleotide encoding a binding agent of any one of claims 1-15.

22. An expression vector comprising one or more polynucleotides of claim 21.

23. A host cell comprising the isolated polynucleotide of claim 21 and/or the expression vector of claim 22.

24. A composition comprising at least one binding agent or derivative of any one of claims 1-20; at least one isolated polynucleotide of claim 21; or at least one expression vector of claim 23; and/or, at least one host cell of claim 23; or a combination thereof; and, a pharmaceutically acceptable carrier.

25. A method for detecting HIV on a cell, the method comprising contacting a test biological sample with a binding agent or derivative of any one of claims 1-20 and detecting the binding agent bound to the biological sample or components thereof.

26. The method of claim 25, further comprising comparing the amount of binding to the test biological sample or components thereof to the amount of binding to a control biological sample or components thereof, wherein increased binding to the test biological sample or components thereof relative to the control biological sample or components thereof indicates the presence of a cell expressing HIV in the test biological sample.

27. The method of claim 25 or 26 wherein the test biological sample is mammalian blood.

28. The method of any one of claims 25-27 wherein the method is an in vivo method.

29. The method of any one of claims 25-27 wherein the method is an in vitro method.

30. A method for treating, preventing and/or ameliorating HIV infection and/or AIDS in a mammal comprising administering to the mammal at least one effective dose of a pharmaceutical composition comprising a binding agent or derivative of any one of claims 1-20.

31. The method of claim 30 wherein multiple doses are administered to the animal.

32. The method of claim 30 or 31 wherein the binding agent is administered in a dosage amount of about 1 to 50 mg/kg.

33. A kit for detecting the expression of HIV in or on a cell, the kit comprising a binding agent or derivative of any one of claims 1-20 and instructions for use.

34. The kit of claim 33 wherein the binding agent, antibody, or derivative is in lyophilized form.
